United States Patent Application Publication US 2022/0282241 A1 - sequence listing, part 2

SEQ ID NO: 1 - DNA, 3978937 bp, Artificial Sequence (residues 1,989,470-3,978,937 of 3,978,937)
  Synthetic E. coli genome
gagaagaggccgtcgcctttgccattatcatcgcaccgctaatggtccggctgggctatgacagtattaccaccgtcctggtgacctatattgccacgcaaatcggttttgccagtagctggatgaacccgttttgtgtggtcgttgctcaggggattgccggcgttccggtgctttctggctccgggttgcgcatcgtggtgtgggttatcgccactctgattggcctgatctttaccatggtgtacgccagtcgagtgaaaaagaatcctcttctgagtcgcgtgcatgagtccgaccgcttctttcgtgaaaagcaggctgatgttgaacaacgtccgtttacctttggtgactggctggtattgattgtcctgaccgccgtaatggtctgggtgatttggggcgtgatcgttaatgcctggtttattccagaaattgccagccagttcttcaccatgggtctggtgattggcatcatcggcgttgttttccgccttaacggcatgacggttaataccatggctagttcctttaccgaaggggcgcgaatgatgatcgcccctgccctgctggtgggtttcgccaaagggattttgctgctggtcggtaatggtgaagcgggtgatgccagcgtgttaaataccatcctcaacagcattgccaatgccattagcggtctggacaacgcggtcgcggcctggtttatgttgctcttccaggcggtatttaatttcttcgtgacgtccggttctggtcaggcggcgttaaccatgccgttactggcaccgcttggcgatctggtcggtgttaaccgtcaggttaccgtgctggcgttccagtttggtgatggcttcagtcacatcatttacccaaccagtgcgagcttaatggcaacgctcggtgtgtgcagggtggacttccgtaactggctgaaggtgggcgcgaccctacttggactgctgtttattatgtccagcgtcgtagtgatcggcgctcagttgatgggctaccactaaaaatgttaagagccgcaattgcggctcttttttcattctgccgtttcagtctctacggcttcatttttggcattgcgcttcatccacaacgctagcgctttcaggctgtctggagtgaactcatcgcagcgtgcggtgatttcttccggcgtcagccagcaaacttcactgacttcatcttcctgtagtgcgaagggaccgtgagagacgcagctgaacaatgcgccccagacacggcaatttttatcttcgaaatagaactgcccgtgctcggcaaaggggacaccggcaatgcccaactcttcttccgcttcgcgacgcgcggattccagcagttgctcatcggcctggactacaccgcctgcggtcgcatctaacatgccgggtaaaaagtcttttgtctcggtacgacgctggaccagaattttgcccatgccatcatgcacgacgatgtaagttgcacgatgacgcagacactgtgcccgcatttgttcccggctggcttgtgcaatgacttcgttctcttcattgacaatatccacccattcagtacttgccaaacgacgctgttccattatcaggaaaccttctttttctggcgctcttacggcgcattttgagttgtgggtaaattacggattaatcgcgacctgcgcaatgatactttgatcattgagtgcgattacactaagtacgtcattatccagcatgccataactcgccggattaccgcctttcggaatactcacgctgccggggttgaagtggaaaatctccccccgctgttctgccactggcagatgggtatgaccgtacaccagcacatcgttctggtttaaagcaggcagattttccgggccaaaaagatgaccatgcgtcaaaaacagacgttgtttttccagtaatacctgttgccacggcgcggttatcgggaaatgcagcagcatttgatccacttcgctgtcgcagttgccgcgcacagcgataaccttatgtgccacttcattaagccgttcagcgactttggctggcgcgtaaccctccggtaaagcattacgcgggccgtgattcaacacgtcgccaaggatcaccagccactgggcaccgctttgggcaaacaactccagaacacgttccgtcgccggtaagctcccatgaatgtcgcttgcaaacatcagtttcatcactcactcctcgtcgaaaaaacgtaagctatgatactggattctgtcgttgctatcagccagattgcttcgcgctaagtgcaataaaacgctggacagacgctcgctgccactggaatgttgcataatccaccaggcgttctggcacctcatcgccatgtagtaccaggcggttaatcattagcgccagatcagtatcagcaatgcaccattcaccaaataaattcggctgacccagtactaacaaatgttctgccatcgcgaacagtttctctgcactggcttttccctcggccgttagtggcgcttttttcgcccccgcaaagacaacatccgtcggacgctcttcgcggatgggcatcagatcgctgcgcagccaggcctgaatctgtcgtgcacgcgcacgattttctaaatcaagcggataaatacgttcccaggtcggtggcgcaaatcgatcttccagatactccgcaatggcagaagattcactcaactcaaaatcatcgatttgtaataacggcacacggcgtgtctgaccgtaaccttgccacgtcggctgcaaatgttcaccgctgtcgaggtcgatggtcttgatatgaaagctcaggcctttttcctgcaacgccacccaggcggataacacataaggggagaaaaagtgggcatcactccaaagcgtgatagcgggtttactcattatgtcctcggcaataaagggggctggctatcaaactatagagcctttttgtcactgtcacgtgacgaatactcacgtaagtcgccgcgctttctatacttgtggtgttcagatgattaaacaaccggagctgcaatgatcgatctctatttcgccccgacacccaatggtcacaaaattacgctgtttctcgaagaagcagagctggattatcgcttgattaaggtagacctggggaaaggcggtcagtttcgtccggaatttttgcgcattagccccaacaacaaaattccggcaattgttgatcattctcctgccgatggcggcgaaccgctaagcctctttgagtctggtgccattttgttgtatctggctgagaaaacaggactctttttgagtcatgaaacgcgtgagcgcgccgccacattacagtggttattctggcaggtaggcggactggggccgatgcttgggcaaaatcatcattttaatcacgcagccccccaaaccattccttacgctattgaacgttatcaggttgaaactcagcgtctttaccatgtactgaacaagcggctggaaaacagcccctggctgggaggcgagaactacagcattgcggatattgcctgctggccgtgggttaatgcctggactcgccagcgaattgacctagcaatgtatccggcagtcaagaactggcatgagcggatccgtagccgccctgccaccgggcaggcactgctaaaagcacaactcggtgatgagcgtagcgatagttaacagaaacaggttctcgtgtattatttcatcctaagtaaaacaacggagaacctgcaatggcacaacctgccgctattattcgtataaagaaccttcgtttgcgtacgtttatcggaattaaggaagaagaaattaacaaccgtcaggatattgttatcaatgtgacgatccactaccccgccgataaagcgcgcactagcgaagatatcaacgatgcgctgaattatcgcaccgtaacgaaaaacattattcagcatgtagagaataaccgtttctctttgctggaaaaattaactcaggatgtgctcgatatcgcacgtgaacatcactgggtgacgtatgctgaagtggagatcgataaactgcacgcgctgcgctacgccgatagcgtatccatgaccttaagctggcagcgttaatcgccatatcgggaggctgcatgaacatagtgatcaccggagggacaggattaattggtcgccatttgattccgcgtttgctggagctgggccatcaaattacggtagtgacgcgtaacccgcagaaagccagttccgttctcggccctcgggtgacactatggcaagggcttgccgatcaaagcaacctcaacggcgttgatgcggtaatcaacctggccggagaaccgattgctgataaacgctggactcacgagcaaaaagagcgtctctgccaaagccgctggaatatcacgcaaaaactggtcgatttgattaatgccagcgacacgccaccgagcgtactcatttccggcagcgcaacgggctattatggtgacttaggtgaagtggtggttaccgaagaggaaccgccgcataacgaatttacccataaactctgcgctcgctgggaagaaattgcctgccgggcgcaaagtgacaaaacgcgagtgtgcctgctgcgtaccggtgtagtgctggcaccggatggcggtattctcggtaaaatgctgccgccgtttcgtcttggcctgggcgggccgattggctctggtcggcagtatctggcctggattcatattgatgatatggtcaacggtattctctggctgctggataacgagctgcgcgggccatttaatatggttagcccctacccggtacgcaatgaacaatttgcccatgcgctcggtcatgcgctgcatcgcccggccattttgcgcgtccccgcgaccgccattcgactgttaatgggcgaatctagtgtactggtattaggtggacaacgcgcgctgcctaaacggctggaagaagcgggttttgcgtttcgctggtacgatttagaagaggcgctggcggatgtcgttcgctgatgtggtttacagcaaacatccgccagttaactcccggtgttacaggattagtggctttgcgcgataagatcgtctggactaagtcgggtcaccatcataactaactctctgtctaaacctctatccagcatctcctgagcaatacgcagggcttcttcgtgtttgccctgcattgcgccttcttcacgtaatctgtcagcaatggtcatcagtttctccttttcttgtggtgcgcgttccgctatctcaccaataaatgcacgaaaacgctgggcatcccctgtttgtaatacgtaattaaacagggcttttagctgtctgtcattagtgttccctgtaactagcaggctaacaatttggtcgactaatcccaacagatcgcgctgacgaatatgtttctgaattaactccaacagcgccattttgcggtgttgcataatctcgtcatccggcaccacggtaatatccaccaacggaaaagcgctactatatattttgcgggctatagcaggctcggcaaattcatcaagccagcagagactataaggataaggacttctgcaaccatgataaaacagcatcgggagcaccaatggaagctctttatagcccgcatcaagatggttttgcattgccgcaatggaataacgcatcatgcgaaaagccattaattcttccggcttactttggtgctctatcactacataaatataacccactccctcctgcgttttcacagaccacaagaggtcggaataatattgccgcaggtcttcatcaataaaactgtttggttccagtttaagcgtcgttaaatcacacagtttgcgcagcggcgcgggaagatgaatatcaataaaatcccgcgcggtgtctggatggcgtaaaaaagatttaaataccgcatcatgcggcgtggaagttgtgcttattgtcatggcgttccgtcacccctcaaatttaagatgacgcgacaataaccacgattaacacccaatgcagcaggcagtttttatctttggacagcgaattcagaagtatttttagcggactgtaacttttacatttcagcggaagctgactcgcaaattccccatgaaaatactccggcagcgttagccaccggagaggaaattatttcaggcttcccttaaggaaccgttgcagacgagggctttgcgggttgccaaataactgctccggcgcgccctcttcttctattttcccctgatggaggaaaatgacatgagtagaaacatggcgagcaaagcccatttcgtgagtcactaccaccatggttttcccctcttctgccagttgctgcataatacgcaacacttcgcctaccagttcaggatcgagcgcgctggtaggttcatcaaacagtaaaacttccggttccatcgccagcgcccgcgcgatagaaacacgctgttgctgaccgccggaaagatgcaccggatatttcccctgcgcacgttcgtctatcccgacttttgccagatacttcaccgcccgctcgcgcgcttcctgcttgctcaggcccaacacctgaatcggcgcttccatgacgttttccagcaccgtcatatggctccagagattgaagtgctggaataccatcgtcaggcgtgtgcgcagtaagcgcagttgatttttatcggcgactttgagttgaccgtctttgtcgcgcaccagattgatcgtctggccattgaccacgatgctcccttcactcggtttttcgaggaagttaatgcagcgcagaaaggtacttttcccgcttccgctgcttccgatgatgcttattacatctccggcattcgcttgcagacttacccctttcagcacttcatgttcgccgtagcgtttgtgcaaatcgataacgtttaatttattctcggacatcgtattctcagtgcgtactagaaggtttcacatgctgcaaccagcgtttttccgctctgcgaaagaggctgatcaggacataagagatgattaaatagagcaccgcggcaatgccgaaggcggtaaaaggttgatacgtggcggcgttaatatcgcgggctattttcagcagatccggcaccgtggcagtaaatgccaacgcagtagagtgcagcatcaggatcacttcgttgctgtatgccggtaacgcaatacgcagcgcagaaggcaaaataatgcagcgatacattttaaaagtgctgaagccataggctctggcggcttcaatttccccatgcggaacgctacggattgccccagcaaaaatctcggtagtgtaagcgcaggtgttaagcgtcagcgccagcacggtacagttcaggccactgcggaagaaagcgttaaggaattcggttcccttaacaatctcaagcgtgtacatgccggaatagaacaccagcaactgaacatacagcggcgtaccgcgaaaaatataggtaaataaccagattggaaactggatgtatttattactggagacacgaccaatcgccagaaacagcgccaggactccgcctatcactacgctcaaaataagcagccacagagtgatcgccacaccagtaaagcgataaccgtcggtccacagcagcggtttccagtattcatgtaagatttcgatcacaggtcagccctcttcacacccacggagtagcggcgctcaaggaacagcagcacaccattggaaacagtggtgaaaaccaggtaaatcacgccacagacgatggcgaaatagaacggttcccaggtacttttgcctgccagttgggtggctttgaccacatcttccaggccgagtaagctaaccagtgcggtagatttgaggatcacctgccagttgttgccaatgcctggcagggcgtaacgcatcatgctcggaaacatgatccgccgaaacacttgcccacgagtaaaaccgaacgccgtcgccgcctctatatgtcctttcggcactgccataaaagcaccacggaacgtttcggtaaaataagcaccgtagataaaaccgagagtgataataccagcgaccatcggatcgatatcaatctgcccgacgcccatcgcctccgtcaccgtgtttagcgcaatctgcaaaccgtagaaaatcagcagcatcaacactaagtccggcacgccacgaatcagcgtggtgtacccttcgaaaatcagcccgctaagccgattttggctgagcttaccgccagcgccaattaaaccgatgattacagcgagcactacagagctgatagccagctccagcgtgacgagcgcaccctgtaaaataacaccactaaacccatacaacatgctgcctgtcctgtcgtgtgtggtgaattaccgcctcttgtctccctccggttacccgaagggagcgggctttctttcaccgatggcgattagccaccataaacatcaaaatcgaagtactttttcgctaatttctcgtaagtaccgtcagcgcgcatttcggcaaaggctttgttcagtgcttcgcgcagttcgttatcttctttacgcaggcccatgccggtccctacgccaaacagtttttcatctttaacagacgggccaccgaatttgtaatctttaccgacaggttgtttgaggaaaccttcgctggcagcgacctcatcctggaacgcggcatcaatacgtccggcagtcaggtcagaataaatgttgtcctgcccctgatagctgacgatttcaatgccttttggtgcccaatgttcattaccgaacgtctcctgggtggtgccctgcaatacgcctacccgtttgcctttcaggctctcgactgtcggctgaatgtcagaatttttcgccaccaccaaacgagaatcggcagcgtacagtttgtcggtgaaggctatttcttgctgacgtttttccgtaatggaaaggctactcatgatggcgtcaatcttcttcgcttttaaggacgggattaacgcatccagcggattttcgacaaacgtacattgcgtattgatgcgtttgcataattcctttgccagatcgatatcgaagccaaccagttcgccttgactatttttactttcaaatggcgcataggtcgggtcggtaccgatgcggatgttttgcggaatcgcagcaaacgccgcagttgcgctggagaaggccagaaccagagagaggcttagcaccagttttttcataatgtcctcaactgacagtctttttatagggaatatttacaggtttgttacacttatcgtgccataaaattgaccatcaaggcaaaatatcccgccccgttagacgtattatttttcattaaaaatgcttaagtatgcatttcaatgcaccacgatagtgcaacaaacctggcgtgcaccatgatgatcattccatcaggtacagcttcccagcgacgtatcagtcaccgtagacattaaagtcgaaatactttttcgccatcttgtcgtaggtgccgtcctgacgcagctcgccaagcgccttattgaaggcagccgtcagttcagcatcatctttacgtagccctacaccggtgccatcaccgaagtattttttgtcttttacactactgccagcaaaggcgaaatctttaccagcaggttgcttgaggaatccttcgctggcagcaacttcatcttgtaacgcagcatccagacgtcctgcagccagatcggaatagaccaaatcctggttggcataggccaccacatccacgcctttactacgccaggtctcgttagcgtaagcttcctgggtacttccctgcagcacaccaacatgtttacctttcagactatccagcgttggctgaatcggactacctttggccgcaatcaaacgagaatctgcggcgtacagcttgtcggagaaggcaatctcctgctgacgtttatcggtaatggaaaggctgctaataatagcgtcgatttttttcgctttcagactggggatcagcgcgtcaaagtcactggcaacccaggtacatttcacctgcatccgtttgcacatctcgttaccgagatcgatatcaaagccaacaaaatcacctttagcatctttgctactgaacggtgcgtaggtggtatcggttccgatacgtaccgtctccggtagcgccgcatagctggaagccgctgtggagagaccgactaacaaagacagagcgagaatgctcttcttcatacataaccctcaagtgaaaatggcttttttatgttgtgtattgtgttgtgtgtttgcaggctctttcatgcaggtcttatgccatcttgacgacaacagtaacattcaacgttaaatatgttaataagacgttgcattattgtcctgaagttgaagatagcaggtatagcggttgaatcgcagcgtttcgattgaatggcagaaacaaaatgtcgaggatttgatcgcggttgcaaaattgccctgaaacagggcaacagcggagttatgcgccctgccagcgggcaaagagatcttcaggaagggttatcgcaaactggtcaagaacacgattaaccgtctgatttatcacatcatcaagggattgcgggcgatgataaaacgccggaacgggaggcataatcaccgcaccgatttctgccgcctgagtcattaaacgcagatggcctaagtgcaatggtgtttcacgcacgcagagcaccaacgggcgacgctctttcagcaccacatctgccgcacgggtcagtaagccatcagtatagctatggacaatgccggaaagggttttgatactacagggtaaaatcaccatccccagcgtctggaaagaaccggaagagatgctggcggcaatatcgcgcgcatcgtgcgtgacatcggctaatgcctgcacttcgcgcagagaaaaatccgtttcgagggataaggtctggcgcgctgcctggctcatcaccagatgcgtttcgatatctgtgacatcgcgcagaacctgtaataagcgcacgccataaatcgcgccgctggcaccgctgatgcctacaatgagtcgtttcataaatagttgccctgtcagacttgcaggcagactttgcaggatttcggcgggagttgcaagtcagggtgccagaccggcaccctcagcgaaggcatcatccttcgttatgcatttcgagattttccacttcgttctgacgttgcactgctttggcgtcatcattacgtaacgtatcgaggaaatcgaggtagccctgatcaacatctttggtgacgtagacgccgttgaacacgctgcattcaaactgctggatatccggattttcagcgcgaacggcgtcgatcagatcgttcagatcctggaaaatcaacccgtcagcaccgatgatctggcgaatttcatcaacttcgcgaccgtgagcgatcagttccgtggcgctcggcatatcaataccataaacgttcgggaagcgaatttccggtgccgcagaagcgaggtacactttcttcgctccggcttcgcgtgccatctcgataatctgctcagaagtggtgccacggacgatggagtcgtcgaccagcaggacgtttttatcgcggaactcggcgcggttggcattcagtttacggcgcacggacttacgacgcagctgctggcccggcatgataaaggtgcggccaacatagcggtttttaacgaagccctggcggtacggtttgcccagaatacgagcaatttccagcgcgatatcacagctggtttctgggatcgggatcaccacgtcgatatccagatcttcccattcgcgggcaattttctcgcccagtttcgtgcccatattcacacgcgcgctgtaaacggaaattttgtcgataaagctgtccgggcgggcaaagtatacatactcaaacaggcacggattgctgaccggattgtcagcacattgacgggtaaacaactgcccttcttcagtgatgtaaatcgcttcgcccggcgcgacgtcacgcaggaaatcaaagcccagcgtatcgagcgctacgctttcggaagcgaccatatattctgtacggttctcgtcaatatcacgttttcccagtaccagcggacgaatcccgtttggatcgcggaaagcaaccataccgtggccgataatcatcgccacacaggcatacgcgccgcggattaagcggtttgtggcagcaatggcagcgaaaatattgtcggcttccagcgggtagtggcggaagttgtccagctcgctggcgaagatattaagcagaatttcgctgtcggaagtggtgttgatgtggcggcgtttttcttcaaacagttttttacgcaactcgtgagcgttggtcagattgccgttgtgggcaagcgtaatgccatacggggagttaacgtaaaacggctgcgcttcagaggcgctggagctgccagccgtggggtaacgcacatgaccaatgcccatattgccctgcaaacgctgcatatggcgagcttcaaatacatcgctcaccagcccgttcgctttacgcaaacggaagcagttattggcatctatggtgatgatgccggcggcatcctgaccgcgatgctgaagcaccgttaaggcatcataaatgctctggttaaccggcataacaccggcgataccgacaataccgcacatacgtctttttcctcgttaagccacatctcagagcacttacgctctgggcaagaaactactgctgctttgcagataatcaaaaaaacatctgatgataaaactgaattgcgggatcagctgacttttgctccagtcttcgcttttgctcaccccggtaaaggagtcgagaaagaagagaatggcagcaacaatcaacacaccgcgcaacgcaccgaaacagacgcccagcacccgatcggtgccactcaaccccgttttctccaccaactggcctatcacgaagttcacgatagcaccaacgatcagggtagcgataaacagtaccgcgatggcaatcccatttcgaaccagttcgtcttcaaagcccgtaaaccagacactcaggtaagtgtagtaatgactggcaacaaagaaagcacaaccccatgtcaccaggcttaacgcttcacgaacaaagccgcggatcaggctaaccagagaggaaaaagcaatcaccgcgattatggcgtaatcaatccagaccatatgtgtcccacgattttacgccctgtcatcctgttcggggcgcattctaacagaaaaagaaaacgtttgcgtagggatttccttcccgcgcatcaataaaaatggcgctgaaaaaatattcaacgccatcgactttttatgcctttgcggcatcgggcaatgcgtgtcggatgcggcgtaaacgccttatccgacctacggttctacccctgcgtaggcctgataagacgcgccagcgtcgcatcaggcaagaccgtattaattcggcgtatagcccattaccacgccacttaagccagaaagttgcttcaactcacccaggctacctttcagcttatctttgctggcatccggcccaaccagaatacgggtaattttaccctgcactggcgtggatgggctcgtataaacccgataaccggcaccgcgcagcttaccgacaatctcattcactttatcggcatttttcagcgcacccagttgcacaacataggctttacccgtcggtgcagctttttcttccacgaccggcttcggttctggcttcggcgcaggtggtgcttcaacctttggtttaggcggctccaccggtttcggcttcggtggggcgaccggtgcaggttccggttcaaactcggtgttattggctgcaatagtggccggatcgaggctcggtgctgcggcatcacctgcccgcacctcttccgctgcgccttccggcggctgcgtcggtaacgcctgggtggcggctggcatcatatcaggctcatcacgatcgcccgctttcggcaccagcgggatagccgcgaactcatcctgataatgttttttctgcccgtccagcagccctggaagtacaatcacccccagcgccaccagcacgatcgtgcccactaaccgattctgaaacttacttgccaccgcttctcctcgcgtcaatcacttccatgacatgtgcgaccgtgtggaaagaaccacacaccagcacggtgtcttccgctttagcgtccgccattgcggcatcccatgcctgcgcaacgctatcaaaacttttgccgttacccaaatgctcaagcagttgttctgccgtggcaccgcgcggcccttccagtggcgcacaataccagtcatcaaccacgcttttcaaccaggccagagttccggcaatatctttatcatgtagcataccgataaccgccagcacgcgcccgtttttcggtagcgctttcatacgcccggtgagatattccgccgcatgtggattatgcgcgacatcaaaaataacgcgtgggctctcgctcacaatctggaaacgtcccggcaaaattgcgctggcaatcccgtcgcgaatggcattttcactgacttccagcccgctggcacgcagtgccgccagcgctgttgcggcattcggttgcgggacaagcggcaacggcagattttccagcgtgccgtgagcatcgctaaacgcccagtcatgatcggtgacggaatagttccactcaacgccccgacgttgtaacagtgcacctttttcctgcgccacatcagcaatggtagaaggcatttccggctcaccgacaattgccggtttttcgctgcggaagatgcctgctttctcgcgaccaatactttcgcgatctggacccagccagtcggtatgatccagcgcaatactggttactaccgcgacatcggcgtcgacaatattggttgcgtccagacgaccgcccagccctacttccagaatcaccacgtcaagttgtgcctgcttgaacagccacaacgcgctcagcgtaccgtactcgaaataggtcagggaaatatcaccgcgtgcgctttcaatctccgcaaaagaggcggtgtgggcgctttccggcaattcctggccctgcacacgtacgcgctcggtataacgcaccagatgagggctactgtagacgcccactttgtaccctgccgccatcagaatgctctccagcgtacggcaggtggtgcctttgccattcgtacccgcaacggtaaacacaaatggcgctggtttcaggacgccaagacgcgccgcgaccaggctcacgcgctcaaggccgagatcgatagttttactgtgcaggttttccagataagaaagccagctagccagagggctcgcggcttgaggagtgcgtttgataatcatggtatccgctgattcgttacggtgagaatagcaaaagggcagagccagtggccctgcccttatcagttatcaggcctcaggttcctgatccggtaccgggggtaccactacgccttcacgcggcgcttcaggattcggcgctggcagattcatcaacttcgccagaatgctcgccagtttcaggcgcatttccggacgacggacgatcatgtcgatcgcgcctttctcgatcaggaattcactgcgctggaatccaggcggcagtttttcgcgaacggtctgttcgataacacgcggaccggcaaagccgattaacgctttcggttcagcgatgttgagatcgcccagcatggcgaaacttgcagaaacaccgcccatcgtcgggtcggtcagcacggagatgtacggcaagccgcgctcctgcatttttgccagtgccgcagaggttttcgccatctgcatcaggctcatcagtgcttcctgcatacgtgcgccaccagaggcggagaagcagatcagcgggcagttatcttccagcgcctgctcaacggcacgcacgaaacgtgcacccacaacagaccccatactaccgcccataaaggcgaactcgaatgccgcagcgacaaccggcattccatacagagtgcctttcatcaccaccagcgcatctttttcgccggtttctttctgcgcagatgccagacggtctttatacttcttggagtcacgaaacttcagcacatctttcggctcaagctcgctacccagctccacaaggcttccttcatctaacaggctatgcaggcgattacgcgctgtcatacgcatgtgatggtcacacttcggacagacctcaagattacgttccagctcagcgcggtataaaacctgaccgcagctatcacacttagtccacaccccttcaggaatgctcgccttgcgggtgggagtaatgttgcttttaattcgttcaatccagctcattagggacctttctgtctgaacctggttcgatgccagttttatctttggggacgcataatgccatttttgcccccaacagaccatgaatgttgcacattaaaacataacagcccgaaactttggataaaaaagtggtcgaaccgcggagttactttttattttgcggcgcgtgccgcagcgcgtttgtgacggattatttcgatgacgcccggcaaaatagaaaccacaataatcccgacgatcagcagcttaaggttatcctgaaccatcgggattgtaccgaagaaatagcctgcgtaggtaaaaagcagtacccacaacagtgcgccgatcacgttataagcggcgaaatgacggtagctcatgtggcccattcccgcaacaaacggggcgaacgttctgacgatcggcacaaaacgggcgagaataatcgttttgccgccatgtttctcataaaactgatgggttttgtcgagataactgcgacggaaaattttgctattgggattactgaacaacttttcaccgaacaaccgcccgatagtgtaattgaccgcgtcacccacaatcgcggcgatcagcatcagcaccaccatcatatggacgttgagatcgttggtttccagacttgccaacgctccggcaacaaacagcaaactatcacccggtaaaaacggcgttaccaccagaccggtttcacagaacaaaattaagaacaaaatggcataaacccagacgccgtactccgcgaccagctctgccagatgcacgtcaatgtgcaggataaaatcgatgaggaaataaatcaggtccatatttgcctatgccttgtactcgtcatctttcaggctgtaactacgttggctacagcctgaaatgttccgagcattattctcgttagtccgccagaaatagcgggcccattggcggttttggaagatcataccggtcagggtaatccaccgcgaccagatacagcccttccgcttttgccgttgctgccgccagcgttctgtcctttgccgccagcaactctgctatccagctctccggctggttgtgggcaccgacttccatcaggctgccgacaatattcctgaccatatgatgtacaaaagcattcgctttaatatctaccaccacataaggaccgtgacgcgtgacattaatatgcataacgttgcgccacggggttcgggactggcactgcaccgcacggaagctggtgaaatcattctcgcccagcaagcattgcgcagcccgatgcatccgttcagcgtccagcggttcgtaaaaatgggttacccctttactcagtaccgccgggcgcagccgatgattgtagatgatgtagcgataacggcgagccgtggcgctaaatcgggcatgaaaatcatcaggtacagttttaacccaacgcacagcgatgtcaccaggtaaattcgcatttacgcccaaggtccacgccgcgtctttgcgcagcgcggttgtttcgaaatgcacaacctgcccggtaccgtgtacccctgcgtcagtacgcccggcgcagaagacggtgatgggttcgttcgccacctgggagagcgccttttccagcttctcctgcacactgcggacttcgttctgccgttgccagccgtaatacttactgccgtcgtactcaatgcccagcgcaattttataaactggcggttgttgctggtcggacattagtacagatactcctgcaccagtttctcggcgatttttactgccatcagcgcgccgccaaagcgaacgttatcggccacgctccagaactggacttgctccggcataccgtagtcattacgcacgcagccaacagaaagatgcggcgtaccgctagcatcacctacctgagttgggaattcgttctcttcagagagcacaatatcttcgccttgaacaaacgcatcacgcgcttcttctgctgccagtggacgcagagcttcaaagttgaccatctgggcatgaccgtagaataccggtgcctggacgacgctagcgctaatcatcagcccttcgtcctgcaggattttgcgtacttcgtcaacgatacgacgttcttcacgcacgctaccttcgctatccggcagtaacggcagcatgttgaacgccagctgacgcccgaagaaatcttcttcgtcaatcggaatgccgttgagcaatttcgcactctgccccgctaacgcatcgaccgcttttttgccctgggcggaggcactaatcaggctggtaacgctgatacgacttaaaccgccctgatcgattaacggtttcagtgccgccagcagctggctggtcagactgtctggtacggcgatgacattccggttccggtaatctgtcagtacaaacgggtttacttccggcaccaccagcggtacgtcgggttcgagagcaaacaatccactgctgtcgatcaccaggcaaccactgttggtcgcttcttcaacccaggcagcggtagcttctttgcctgcgacaaaaaatgccagctgcgcctgcgtccagtcgaattcagcggcatcctgcacggtgattgtcttaccaccaaagcgcagttgttcgcctgcgctttcgttacgtgccagtgcataaatttccccaaccgggaactgacgttcagccagcgtttcaagcagggcttcgcccacagcgccagttgcgcccaggacggcaatgttccagccttcagacatggtggtttactccagaaatagcaaagctccctgccaatgttacagcagagagcatgaagaagagattaacgtgccggatgatgaacggcgttaaaacccagtttacacagcaaacttgccgcactggcgtcatcacaaattacatacagagaactccattcacggcgctcaagatagtttttgcgcagtttatcgaactcacccggtatcccggcgactttacgcagcggtgcgtcatcgcggcgcacatcatacaccaaatgcaccagccttttcagcgtcggttgatcgagcgggccatgcagcgtaatgcgaccaaactctggcgcaggcagtaatgtatccagcgcaacgtgctgttcatgcccaataaacttgctataagcttcaaacacttgcgtagtaccgcgtgctttaccttccagggtatagcctgcgatatggctcgtgccgatatccacttttttcagcagctcgacgttgagttccggttcgccttcccagacatccagcactacgcttaacttctggccttcattcaggcaggtcagcaacgcagtattatcgacgactgcgccacggcaggcgttaatcagaatcgctccgggcttcaggctacggatcagtttttcatccgccagatgtagcgttttgtacggaccatctttaaagagtggcgtatggaaagtcagaatatccgcgcgctggactaactcatccaggctgcggaaatcaccctcatccccacggtcggcgcgaggcggatcgcaaagtaaggttttaatccctaacgcttccagtcgcgcctgcaatcgacgtccaacgttaccaacgcccacgatccccaccgtacggtcgtacagactaaatccatcgcgttcggcaagcatcagcagggaggagaaaacatattccaccaccgcaatcgcattacagccaggtgcagcggaaaaaccaattcccgcctgcttcaaccatgcttcatcgacatggtcggtccccgcagtggcagtgccaacaaatttaatgggttttcctgccagcaaagattcattcactttcgtgacgctacgcaccatcagcgcatccgcgtctgccagttgagcgacggggattggacgcccgggaaccgcggtcacctcacccaaacggctaaataagtcgcgggcataaggcatattttcatcaacaaggattttcacgtttgtgttacctgtatgagacgagagttaaccggacaagtgtgccataatctcgcggccaggcatacttgcgaagatttcaggtataaggatacgtaatgatacaacctatttccggccctcctcctgggcaaccaccaggtcagggagataatctgccgtctggcacgggcaatcagcctttatccagtcagcaacgtactagcctggaaagcttaatgacgaaagtgaccagtctgacgcaacagcaaagagcagaactgtgggcgggtatcaggcacgatattggtctgagcggagatagtccgctgcttagccgtcacttccctgccgctgagcataatctggcgcaacgtctgctggccgcgcaaaaaagccattctgcccgccagcttttagcgcaattaggggagtatttacgtctggggaataatcgtcaggcggtcacggattatatccgtcataactttggtcagacgccgctgaatcagctcagtccggagcaattaaaaaccattctcaccctgttgcaggaagggaagatggttattccgcaaccacagcagcgcgaggcgaccgaccgtcctttattaccggcggagcacaatgcgctaaaacagctggtgaccaaacttgcggcggcaacgggggaacccagcaaacagatctggcaaagcatgctggaactttccggggtgaaagatggcgagttaattccagcgaaactgtttaaccatctggtgacctggctacaggcgcgtcagacgctaagccagcaaaatacgccgacgctggaaagtctacagatgacgctaaaacaacctttagatgccagtgaactggcggcgttaagcgcatatatccagcaaaaatatggtctttctgcgcaaagtagcctttcttctgcccaggccgaggatattcttaatcagctttatcaacggcgggttaaagggattgatccgcgtgttatgcaaccgctgcttaatccttttccaccgatgatggacacgttgcaaaatatggcaacgcgtcccgcgctgtggatactgttagtcgcgattatcctgatgctggtctggctggttcgttaaccccgacgaaaactcagtatcgtgacaataatacccagcaccgcagagatcgccccggcaagaaatacgctagagtaaccaaacgtggtcgccagcattcccgccagcggcccggagacgccgagggcgatatcctgaaacgcggcgtaaccgcccagtgcggtgccgcgaacttgactggggacgcgtttaaccacctccacgcccagcgcaggaaagataaggctacatccggctccggttaacgccgcgcccgctaatgcgacccatgcacctggggcttgccagagcagcaacaagcccaccgtttctacaagcagagagacaatcgccactttcacgccgccaaaacggtccggcatccagccaaacatgacgcgcatcacgacaaatgcgccgccaaacgcggtaagagtaaagcccgccatcgcccatcctttgctggcaaagtagaggctaacgaaagtcccgataacagcaaaaccaacgccttgtagtgccagacctaaccctggtttccagataagcccgacaacgctccacaggcttggacgttctcccgccagggccggtactttgcgcactgtgccgttacaggcccacgccagtacgggtaataccattgtggtgatcgccagtgcggcaaaaccgtaatggctatgaatcaacaggccaagcggagcaccaacagcgagggcaccgtaaatcgccattccgttccaactcatcactttgccagagtgttttggccctacgatgcctagtccccaggtcagagcgcctgtcagtaactggctttcaccaaagccaagaatcaaacgcccgacgaccaacagagcaaatttgaacggtgcggagacaggcaaaatcgccgccagcagcaacgcgccgccagccagaccacaagctaacattccctgaagcgcgctacgttttgcaccatattgatcggccagtcgcccggcgtaaccacgcgtcagcaccgtagccagaaactgaatcccgacggcaatgccgaccatggtattgccatagcccagttcatgatgaacaaacagcgggataaccggcaacggcaaccctacggtcatgtaggtgagaaaaaccgcaaaagcgatgcggaagaggctaaaattggcagaagatcgtgtttcggtttggcttacagcagtcatgcattactccagaatgcagcgcaaggcgaggagtatccccgtctcatctctctggtttcagggttacggtgcgttggcaggatttaacgcgtacgtcttttcagaaggaaatcgacaaagcgggaagtttgcctggaactggcggcgattgtcaatgatgtgaaaaagggaaccatcaggttcccttttgcgttagtgccggaggccgcattggcgcgtaacgtcggatgcgacgctggcgcgtctactccgacctactgcgaattaatctttcagcttgcgcattaccagcgtggcgttggtgccgccgaagccgaagctgttagacataacggtggtcagttcgcgatcggtcgtttcggtcacgatgttcagacccgcagcctgctcgtccagctcttcaatgttgatgctcggggcgataaagccgtgttccagcatcagcagagagtagatagcttcctgtacgccagcagcgcccagagagtgaccggtcatggctttggttgcagaaatcgccgggctcttatcgccgaacacttcacggatagctgccagctctttcacgtcgccaaccggagtgctagtaccgtgggagttcaggtaatcgattggggtatcaacgccatgcatcgccatcttcatgcagcgtactgcgccttcgccagacggagcaaccatgtctgcaccatcagaggttgcgccgtagccaacgatttcagcatagatgtgagcaccacgcgccagcgcgtgttccagctcttcaaccactaccataccgccgccgccagcgataacgaaaccgtcacggtgagcgtcgtaagtacgggaggctttttccggggtgtcgttgtatttagtagacagcgcacccattgcgtcgaattcgcaagccatttcccagcacagctcttcgccgccgccagcaaacacgatgtcctgtttgcccagttggatctgctctactgcgttaccgatacagtgtgcggaagtcgcacacgcggagctgatggagtagttaacgccatgaattttaaacggggtggcgaggcaggcagaaacgccggatgccatcgctttggtgaccacatacgggccaaccgctttcaggccgcgcgggccgcgcattgcgtcagcgccgaacacctggaaacgcggggagccgccgccggaacctgcaatcaggccaacgcgcgggttattctggtaagcttccggagagaggcccgcatcagcgattgcctgctccatagaaaggaatgcataaatggatgcgtcgctcataaagcgcacaactttgcggtcaatgaggccagtggtatccagttttacgttgccccagacgtggctacgcatgccggaatccttcagctcctgagagaaagtgatcccactacgtccttcacgcagagatgccaggacttcctgctggttattaccgatgctggaaacaatgcccaggccagtaatcactgcacgtttcattcaatacctctgtaagtcgcacatagagtaagtttcgaatgcacaatagcgtacacttgtacgccgaacaagtccgatcagccatttaatagagaaatttgcgcagccttacacacatcgctaagatcgagccaccgcctgtaagacgagtaacttacgtgaaacactactccatacaacctgccaacctcgaatttaatgctgagggtacacctgtttcccgagattttgacgatgtctatttttccaacgataacgggctggaagagacgcgttatgtttttctgggaggcaaccaattagaggtacgctttcctgagcatccacatcctctgtttgtggtagcagagagcggcttcggcaccggattaaacttcctgacgctatggcaggcatttgatcagtttcgcgaagcgcatccgcaagcgcaattacaacgcttacatttcattagttttgagaaatttcccctcacccgtgcggatttagccttagcgcatcaacactggccggaactggctccgtgggcagaacaacttcaggcgcagtggccaatgcccttgcccggttgccatcgtttattgctcgatgaaggccgcgtgacgctggatttatggtttggcgatattaacgaactgaccagccaactggacgatagcctaaatcaaaaagtagatgcctggtttctggacggctttgcgccagcgaaaaacccggatatgtggacgcaaaatctgtttaacgccatggcaaggttggcgcgtccgggcggcacgctggcgacatttacgtctgccggttttgtccgccgcggtttgcaggacgccggattcacgatgcaaaaacgtaagggctttgggcgcaaacgggaaatgctttgcggggtgatggaacagacattaccgctcccctgctccgcgccgtggtttaaccgcacgggcagcagcaaacgggaagcggcgattatcggcggtggtattgccagcgcgttgttgagcctggcgctattacggcgcggctggcaggtaacgctttattgcgcggatgaggcccccgcactgggtgcttccggcaatcgccagggggcgctgtatccgttattaagcaaacacgatgaggcgctaaaccgctttttctctaatgcgtttacttttgctcgtcggttttacgaccaattacccgttaaatttgatcatgactggtgcggcgtcacgcagttaggctgggatgagaaaagccagcataaaatcgcacagatgttgagtatggatttacccgcagaactggctgtagccgttgaggcaaatgcggttgaacaaattacgggcgttgcgacaaattgcagcggcattacttatccgcaaggtggttggctgtgcccagcagaactgacccgtaatgtgctggaactggcgcaacagcagggtttgcagatttattatcaatatcagttacagaatttatcccgtaaggatgactgttggttgttgaattttgcaggagatcagcaagcaacacacagcgtagtggtactggcgaacgggcatcaaatcagccgattcagccaaacgagcactctcccggtgtatagcgttgccgggcaggtcagccatattccgacaacgccggaattggcagagctgaagcaggtgctgtgctatgacggttatctcacgccacaaaatccggcgaatcaacatcattgtattggtgccagttatcatcgcggcagcgaagatacggcgtacagtgaggacgatcagcagcagaatcgccagcggttgattgattgtttcccgcaggcacagtgggcaaaagaggttgatgtcagtgataaagaggcgcgctgcggtgtgcgttgtgccacccgcgatcatctgccaatggtaggcaatgttcccgattatgaggcaacactcgtggaatatgcgagcttggcggagcagaaagatgaggcggtaagcgcgccggtttttgacgatctctttatgtttgcggctttaggttctcgcggtttgtgttctgccccgctgtgtgccgagattctggcggcgcagatgagcgacgaaccgattccgatggatgccagtacgctggcggcgttaaacccgaatcggttatgggtgcggaaattgttgaagggtaaagcggttaaggcggggtaatctgctctcgcagtgtttgccggatgcggcgtgaacgccttatccgacctacgtgtgacgtgtaggcctgataagacgcgataagcgtcgcatcaggcatgctgctccagacgccgcaacttactgctgactcgcctgctgaaacaggttttcccacatatcggtcaccagcgcctggtcacgcgggctcaattcaccagcaccaatggctttttccagactctggctaacggtcgtatgcaccgcctgagcggagtggtcatcaccactttccagttctgcgatggctaatgtcaggtggccacgcaaatacccactggcaaacaactcatcatcactggcatggtcaaccataccgtcgattaatgccagaatgcgactttcaaactccgcgatcatcttctttcctcattgtaaaacgtggcgctggcttcagttgagcgcttccggccacgggaactgttccgccgtaagttccggcgtgtgataataattttgtagtgctttaatgaagcgtgccggacgttccggaatgccatttgtcagataatccatcacctgcgcatgtactcgccgttgaaacaccacacgatccggttcgaaatccccttccagattgtcgcaactgacgttaaacggatatcccgccgccacacagaacaaccagtcgagcgcctgcggcttcacttcaacatcttcaaactggctttgcgtttgggcatcgcgtccgtccgggcaataccagtagccgaaatcaaccagctcacggcgcgctttcccggcaatacaccagtggctaatctcatgaattgcgctggcataaaagccatgagcaaagacgattcggttatacggtacttccgcatcagcaggaagatagatcggttcgtcgtcgcctttaatcagacgggtattaaaatcatcggcaaagcagctattaaaaatttcaatcaactgctcgtagtggtgtgtactgttcattagttcatccccaaccagtggaggatctcctgtccgtggctgtcgtaaagtaatttggcactcatcaccgcgctgacgataacaatcatcgggcggatcagcttttgtcctttgctcaacaccagtcgactacccatgcgcgcgccgaggaactgccccaccagcatgacaaagcccgtcgcccaaatcactttgccgccgagaataaacagcagtaaaccgccgatgttactcgttgcgttgagtaatttggcgtgagccgtggctttggcgaggttaaatccgcacagcgtaacgaaggccagcgcgtaaaagctcccggcagccgggccaaagaatccatcataaaaaccgacgcagccaccggctattaacgcgaagggtaaaccgtacatccggcgctggcggtcttcttcacctagctttggcatcagcaagaaatagaggccgatacaaattaccagaatgggcaaaatctgccgtaagacatcagcctgaacgtattgcaccagcagtgcgccgctcatactgccgacaaaggtcatggcgatattgagtttctgatcgcttaaactaaccactttgcggcgaataaagtagatagtagcggaaatagagccgccgcaggcttgcagtttattggttgccagcgcattagcgggagacatccccgctgccatcaatgccggaatggtgagtaacccaccgccaccggcaatgctgtcgataaatcccgccagcatggcgacaaaaaagagaactcccagcaacagcggggaaaccataaacaggctattaaacgtttccattagatcacgtgctcatccagtagcgcctggcaggaaggcggcaacggaggcggtgtcttcttctcaggctttgttgttcccggttttggaggttcaaaccagctttgcagttctgccccgcaaccatcgccacttggcggtaaaggttgatcttcacactccagactatcggcagggcaacgtaatcgtacatgcatatgcgcgcgatgctggaaccagggtcgcactttgcgcaaccagtcgcgatcggtgcccgcatcaaggcaaagttgttgtttaatcgccggattaacaaaaatgcgcgtgacgtctttgtcctgggcggcgagtttgatcaagctgaaaatttctggcttccacagcgtggagacaacgtgtttaccgtcgcgggaaactaagtccagtgcttgcgggcgcaagagctgcgcggaggtccagcgagttttcggcagttgcagaaagatatcgacatccagtccggtctggtggctggcatgaccgccgttgaaacgcccaccagcgggcatccccatatcgccaatcagcaccgtacccatgcccagattgctcacctggctactcagacgctggataaacatcaccagatccgggtgaccgaaatagcgacgctgatcggtacgcatgacctgataatgttcggactgtatcggcagcgtgtcagcgccgacaatacagccattagaaaaactgcctatgctttgtgcgctacccggcacaggttgggttattttttgccacggcgtcgctgccaggctggcgctactggcaagcagagccagcagcgcaatcgcggttttattcattttttaccagcgtggaatatcagtcttcacatcggcattttgcgcccgttgccgtaacaggtgatccattaaaacgatcgccagcatcgcttctgcgatcggcactgcgcggatcccgacacagggatcgtgacggcctttggtgatcatctcaacttcttcgccaaagcggttaatggtacgacccggcacggtaatgctggaggtcggtttcagcgccatatgggcaatgatttgctgcccgctgctgataccgccgagaatgccgcccgcatggttgctctggaaaccgtctttggtgatttcatcgcggttctggctgccgcgcagcgccaccacgtcaaagccgtcgccaatttccacgcctttcaccgcgttgatgctcatcagcgcatgggcgatgtcagcatccaggcggtcaaagaccggctcgccaagtccggcaggaacgccactggcaacaacggtgactttagcgccgatggagtcgccctcttttttcagcgcacgcatcaactcgtctaacgcgtcgattttgtcggggtccgggcaaaaaaacggattttgctcgacctggctccagtctttgatatccagcggaatgtcgcccatctgggtcaggcagccacggatttcaataccaaatttctcggcgagatattttttggcaatagctcctgccgccacgcgcatggcggtttcgcgggcggaagaacgtccaccgccgcgataatcgcgcagaccgtatttttgttcgtaggtgtaatcggcatggcctggacggaaaacgtccttaatcgcactgtaatcctgagagcgctggtcagtgttttcgatcaacaagccaatgctggtgccggtagtaacgccttcaaaaacaccggagagaattttgacctgatccggctcgcggcgctgggtggtatagcggcttgtcccagggcgacgacggtcgaggtcatgttgcaggtccgcttccgtcagcggaatgcctggcggaacaccatcgacgatgcagccgagcgccagcccgtggctttcgccgaaggtggttacgcgaaagagttgtccaattgtgtttccagccatcacggctccgttattgttgtgtttgcgtgtttacttaatctttataaatcgcgaaatgttctcgtgcggcaataagctgctctttggtgagcataaacacaccatcgccgccgttatcaaactccagccaggtgaacggaacatccggatattgttccataagatgtaccatgctgttgccgacttcacaaatcaacacgccatcatcagcaaggtaatctgccgcgttaccgagaatgcgacgcgtcagtttcaggccgtcagtgccagatgccaggcccagttccggctcgtggcggtattcgtttggcaggtcggacatatcttccgcatcgacatacggcgggttagtgacaatcaggtcgtactgcactttcggcaagtcgcggaacagatcggaacgaatcggaatgacgttgtggatcagaccgtgttcttcgatgttctgttcagcaaccgccagcgcgtctggagagatatccaccgcgtcgacttctgcatccgggaaggcataagcacaggcaatggcgatgcagccgctaccagtacacatatctaaaatatgctgcggttgcttgctgataagtccggcaaatttattgttgatcagttcaccaatcgggctgcgcggcaccagcacgcgttcatcgacgtaaaattcatggccgcagaaccacgctttgttggtcaggtaagccaccggaatgcgttcattgacgcggcggatcacgcgttcaacaatacggtgtttttcgctggaggtcagacgcgcggtgcgcatatcttccggaatatccagcggcaggtagaggctaggcaacaccagctgtacggcttcatcccacgggttatcggtaccgtgaccgtaccagatatttgccgcgctgaagcggctcacgctccagcgcaacatgtcctgaatggtttgcagctcatttactgcttcatcaacgaaaattttatccacgtattcctccagggcatgatcgcaataatttcggcggctagtttgccatgaagatgacgataaatcagcattcacgcgcggtgagtgaggaaaaatacgtttaaaacgatcgattgcgctacgagtcgggtaaactgtaggaaaattagaaatagagacagataaatgaaaaagaaaacaacacttagcgaggaggaccaggctctgtttcgccagttgatggcggggactcgcaagattaagcaggacacgattgtccaccgaccgcagcgtaaaaaaatcagcgaagtgccggtgaaacgcttgatccaggagcaggctgatgccagccattatttctccgatgagtttcagccgttattaaataccgaaggtccggtgaaatatgttcgcccggatgtcagccattttgaggcgaagaaactgcgccgtggcgattatagcccggagttgtttttggatttacacggtctgacgcagctgcaggccaagcaggaactgggggcgttgattgccgcctgccgccgtgaacatgtgttttgcgcctgcgtgatgcatgggcacgggaagcatattttgaagcaacaaacaccgctgtggctggcacaacatccgcatgtgatggcctttcatcaggcaccaaaagagtatggcggtgatgcggcgttgttggtgttgattgaagtcgaagagtggctgccgccggagttgccctgaggagttgagcgcgttgcgccaggtacgggtaatggcaggggcgaatgcccctgcctggtgtatctaagggttacaactcattcagtatgtactggaaccggcaagtagaatcgattggctgcatactgctggtatcaacacgcacgaccatatcgtgtaactgtttgtccgttatagggtgtcgatttggcgtgacgctgacttccgccttgtcacatccgctcgcggtaaaagttatcatctgtgcaacccagcggcagtaaccacctgtttcattcatctgcgtactgtcgcacaacttcccatctttcatcaaatacgtactaagcgttttctcaaccacaccgcccgtgctctgcagggtgagcagtttactcttactgacataattctcattccaactaacgtcataaggttgaacagaaacggatggacaaatcgtgtcgtgactatcaggcccctgatacgtcacgccccctggagaggcttcagagtcattcataataaccaaccatggacaagaaaagtaagattcaatctctgcagagacaataacctcaaatgtataatacccgcagttccacccagacggtaatccaggacaacttgctttgttgatattttgatggtagccaatcagcttaacgctaggggcaggaggaggaccactccagctcacattttgcaatatttccccagtcatgagccattgactacttttatattcaccaacgtacactgcggatggcatcattatttttaaattaaaagtcgcaatattacggctatcaccgttgtaaccgtagtaaacgtcaacgctatgcccggcagccatagcttctgtagtagcaataagcatgaccagagcgaacaaccatcgtagtattttcattttaaatatactcaaatgtcgcagttaaagaggcggtaaattcaccgatcgtcacatcacggccgcttttcgcctgtagccaggctctgaaattgatatcgttattgccattggttagcgcaaaggtcgccccatttgtattgttgatggcaacctgcattccgtcggttttttccatgccaattcccactccctgagcggtactactcgtatccagtgccagaaaaccgggttgttcgctgtcttctacccccgtgagcgtgacttttacgttgtatcccgccggccctttgcaatctttcagcttaaagactacgggtacacgagcggactggcctgcaacgttcaaatcctgacgactgaccgtgggaaagcgcacctctgccagatattggccatccaccaccagcgcacaggatttacttaataaattaccggagaaatgcagattattatctgccgcgaataacgtgctactcattgccaatatcagccccgctaacaggacgtaaccaccggactgaatcatacttttattcattgataatccacccgtaatgttgcgtaagcgctaaaattcgtatcgcttaacacagcatcactcgcttttaccggtacggcctccagcttcggcttttgcgtaaaatcagtggcgttgatagcaagcggagtattgagtttaaaacgctgaccatcgtgctgaagctcgataccaaaaccgggtacatcagtttcaattgctgcatcattaaaactggtttgtgtaccagtccaggtgagggtcatctcccaatctggatgacgggtcgtgctgtcacaagtgagttcatatggcacctctttacgaccatagttgccgttgatgtcgtcgataatgagatcgcgaaattcgacttcaatggttttaccaccgctgatgctacaggttggcggactcaataatgtcccgtgaaaggtgatgtcttcatcagcagcatgagctatggcgctactgacacaaagcagggttaagaaagtctttctcattgatagtccaccaccatggtcaaactggcgttaaactcgcccgcagcaagttgcgccccgcttgccttcacaggtacagccttcaactgtggctggttattgatattaaatggcgtccagctattttcaccgacggcaaacaaactgttatcggcgctattttctatccgaatgcccagcccggtgatattggtactgagtaccgtttcgccgttaatcgtactggtattgcccttaagttgcatccgcaagtcgttagcaagactgtttgtgcagttcaacgtgtatttcgcatcttgccgataattggtgccatcaacgttatcagcaatcatattgccgaactctacctggctgcccttgatactacagggtggcggagcatcgaccaacacgcgcagaattaaatccacgggtttactaccagccatagcagataaactacagacactgcataccagcagccctgcgcccactacaaacttttgactcataactccccccgtcatcagcctttgcggctctgctcttcatccacctggcagctgttgccattgcactggaagaacagcggcatccgtgcgccaaagtcgttgacgtaagtcagcaccggtacgctatccattttcacattcagcggtaccgtggttttcggctcaatgaccagagggctgaaccctgcagctggattaccgtttttctgcgcactggcgttgctgataatcacgtagtacggcgttgggttattgacggtaaatgcctgaccgctgcgggtgagcgtcaccttgtgctgccacggacttttcatactgaccttttccagcgcctttggtcgccagaacaacttgatacgcgtttgcagcgcgatttgcagggtattgggtttgttactttttggcgggatctcgcgcacgttaaagtagaacatgctttcacgatcggctggcaatttgttgatatccggcattccctgcacttttacctgcccgttcatcatactatcgatgcgttgcactggcggcagcacagttaacgggctggtgatcttgttacccttttcatcttcaatccagctttgagccagataagggagtttcggatcgttattacgcagcgtcacgctgatacttttgtcgctttcattaaatatcaaacgggtacgatctggcgttacagacgccagggcagacaaactggtagcgctaagcagtaacgccagcgtcatagcacccaatttggcagagcaaagtaaatcagacatggatcattccttaatcacgttattggttagcactaacagaaacagggggatcggtgggtgtcacctgttgcgtctgctcctgaatgacaggctttatgtcatcaggaacaaccggcgcgacgttgcctttatgctggcatggcagtaacaagccgttaaacagatcggcaggcagcgggtccggcaggttgatatcgcaatgcgcaacaccactccagaacacactcatatgttcgccaggtttcaccccagccagatagacactaccgtcatcatcgacaaggcccactgtctgctcgttatcattttttacttctgcgccaaacggtggatggctgccatcttgtaaacgcagcaccgccatcgctttttgaccactgatgacggcaaatttgcggtagccaatggctccttcagttagcgtggcttgcaccacgctctgggttgcttcggcgttttccggcaatttgttgaggtcgatatacgcctgattgcgataataattgttaacgtcagaaacgacggctttaccaaacatattggtataaacagcagccccgttaccttccaccggaacatcggcaacgccatcggcatcaatcagcaggcgtgtcccgcccatattctgggtacggtgaagtgcgccgccgtgggtagtaagcgttgcgccgccctgtaagctcaagcccgcagaggtgtattgcccttcatggtagttcgcactgaggtcaacctgcgccaggctaccatcatggctgtagtagccatcaacgctggtgtgtttgtcactggtgccgatgttcaactgatagtgagtcgcgtcatcgacacggctaaaataaccgacctggctgctgtccgtcccactgccatagttgccgttatagctaacggtactgttgtcgccccacggcatactgagcgaaatttacatgcccttatccgcccggttgtcatactcgtagcggtagccagtcagggaaacgctcatattacgaatgctgcccatattgaaatagtgggagagcatgatgttgtagtttgtctgctcctcacgatcccagtaggtatggcgggtatagttgagataaacgctaacacccgcatcgcggaagttctggttataagtggcggtgtacatctctttgtcgttgcccgtacggaccatttcgctgtcactggcatccagatactcgctcatggtcataaagttctcttcgctgaagcgatatccagcgaaagtgacgcggctgttgagctggtcaaagtctttggaataactcacacggaaggagttaccgtccaggctacctttgccataagcggtgtctttatccagtttggtatggctatgagtaacatcaaacgcgaccgcgccgaaggtagacaaatcgcgaccgacgcccagcgccgcagactgatagttttcatcacccagcgcaccgccatataagctccagccgttagcgatgccccaggaggcttcagcaccagagaaaaatcccccctcgacatggtggccccactcttgcggacgtcccatcatgatcttatagcgaacctggcctgggcgagtgaggtatggcatgctggcggtgctgatgtcatattcctgcacctggccgttctgttcttcaatgcgaatatgcaacgtaccggagacggaatcaccaagatcctgaatacgaaacggtccagccggaacctgcgtttcgtaaatcacacgccccatctggctgacggtcacttttgctgtggtgtgtgccacgccggaaatgtctggcgcgtagccgcgcagattgggaggcaacatttgatcgtcagtgctgacactgccaccaacataattaaaaccgtcgaaaatatcggaattgaggtaatcttcgcccagcgccagtttggcttttaaactcggtaacgcccgccaggcataatagcgactccactcccattttttttgtgtgtcatcgccgccaaattcatcgtcatcatcattactgcgcgtatgttgatagttggtctgccagtcagcgcgcatacgccatggccccaggttaaccccgaccgtcccgttgccgctgatctcgttactgtcatcgccgccattttcttcgtgtcgtgtttgcgcagtgatgctgtagtccgcaatgatcccggagatgccatcatcccaacgagaaggtggatcccagtcgggccaggtatattcgaggtaagcctgcggtagactaatgactaatgcggactggcttaaatcagccttaatttccacgccttccagttgaccgggcttcaggcatttaccatcgtggctccattgcagatttttcgccacgtcttcttttaaaccaaactgcgccaccagttccggtgtcagacaagcatagcttttgctaacgtcatcttcaccagcataccagtaaatatcgtactcttccgccaatggctgtttatttagttgaacctgtaaattgtattttccgggctcaacatacccctggctggaaaaacgcttcagatcaatttttgtgtcgccttttaattccagaaaacgggaatcaaactgaatgtcgtcttcagcccagacactgctataactcccactcattgccagcgcaatgcaccacggaagaatccgtaatcgaaaaagagaatggtcaggcatacacgtttttatccgtttttattcttgttcggtcaaaatccatttaaataccccatagcagtgtcgctatgggggtatgccttacaggtaagtaatctggaaggtggtatttgcttcgaaattacccagatctggcgcatcagctgcgccgaccagccaggctttaaagttcagagtctgcttcgctttgcctttattagtggcagtatctttcacgattttctggtcaatacccatgccgcttttgtaagaggtacccagagagtcaccgatcgccaggctaacattgttaaatgccgcaccggtatcggtattgaaaatggtgtaataattgccgctatttgcagaagaaacggtaccagtaaaggtagtggtcattgtttcctgagtatcaaatacgcaatcttgcaggcgaatctggaaatttttcggcgtggtggtgccgttatttttcagtttttcggcaccgatatcacccatatcaacttccagtttgtgatcgtccggaacgatagaacacacactgtcttcaatggtgccgtaaaaacgtgcagtaccgttgttacccgcagcgattgttgccgtagaggtgaacgcgcccatcaccattgccgcagcaatagctgttttaacaaacttactcattatttgtccttaaactataaataattaaaatataaacattgcaatacattgattcagtcaatagccaatgtttatacccagccattgaatacggcatgcgatccaaaaaaacaggtcgtaaaaaatgtattcgttggtgtggggtcgaatagtgatgttttcactcccctgattcaatttaattttactaatgagtaaatgtagatttaattaatatattgataggggaaagattatcttaaggatcttctaaaaaaacacgaaatatatatttagaaaaaacaggaagcatatcaacaatgaatgccaatagcttaaaaaacaaacaatgaacatataatgcgattggcattaacccgcttttgtcgatataatatataaacactatagccagaatttaatcaagtttcaattacgtcctgcctgattattcaactctattttctccattatctgtattaataaatgataatgagtgtcaaacagacattattcatttcaacatgtaactttgggcaaaatcaagatacgcgcagaagaatactttccgaatgaaagttaaaggtgttttatttatagatggggagagtcttcgatagtagtgaggttgacagatatccgctgcctgatgagcaattatgcccaatgaatctacctcattgggcataatttggaactcatcagatagcttttgccatcttcagattacacgggctcatctgccagttgaatgtgccgtttccgctttcatcaagcgttacgctggcaatggcgctggtggtaaacataggcggcgtttcgcccggacataactcggcaaccagatacccgactaacggtaagtgagagatcaccagtacgctagcaacaccttcattggtcaacgcctgcaaataggcactgaccagaccaacatcgccgcagggcgttaactccggcagaacttctgcactggaaggcaggttcagacaatcccctacttcttccagtgtttgctcggctcgcaggaacgggctcaccagaacgcgttcgatttccactttttgacctttcagccagttcgccatcaggcgagattcgtcacaaccattagtggtcagaggacgaacggaatcactggcggcatcgagggctgcgtcgccgtgacgcatgataaaaacttgcatattgcaccgcttttgttaaccagattcgcccgttttctttcatctgaaaccagagaaagaaaacggtggccggcattgtgccttatccattcaccgaatgaaacgctgttttttacctcaatggcgtaagtatagtcaatatgcgtttacattttgaccaacactccgccattcagcgcggattcatatagctttgaccttcttattgcaggtcagttgcagttgttttccaaaaactttccccacgcgcgcccatctcgaccaaacgctcgcaaggggtaaaacgggaaccatactgcgtggcaagtcgttgcattattgcaaccacttcgcccgcgccgagagaatcgatatagcggaacggtccaccgagaaatggcggaaaaccaatgccaaataccgcgccaatatccccgtcacgcacgctacggataacctgctcatcaacacaacgtactgcttcattcagcatcaacatcacacaccgttcagcaacctgcggtgcggagattcgcccctgcccttgtgtgccaatcagcgggtaaatggcgggatcgacctgttttttgcttttacgccctttctgaccataaagatagaaaccccggccattttttctgcctttgcgatcgtcgttcaaaatactagaaacaacatttgcaggcgcgctaaaacgttctccataagcggcttccagtacaggaataattttagtcccggtgtcgattcctacctcatccaaaagttggattgggcctaccggaaaaccaaatttcactagcgcggcatcaatgtgctctacccgttcaccttgggtcaacatgcggatagcttcattaatgtaaggcgctaagatgcgattgacgtaaaaaccggctttgtcacgcacgacaattggcgttttaccctgttttttcgccagttttactgtggtagcgatggtttgcgcgcttgtccccgcatgaggaataatctccaccagcggcattttttccaccggactgaagaaatgcaggccgataacttgctcaggtcgcgtggcgtgagcggcgatatcaccaatcggtaaagaactcgtattgctagcaaagatggtatgagcggcgcaattttgctcaacttccgccaccatctgttgtttcaattcgagattttcaaacaccgcttcaataatcagatcgcgatgggcaaagccgcgatagtccgtcgttccggagattaatgccagctgtttgtcacgttcgctggctttgagatgacgacggcgaactttgccctccagctgatcccaactgtacttcagcgcatgatttatgccctgcgggttgatatctttaattctgaccggaatccccgctttacaagcagtgacataagcaataccgccgcccatcaagccaccacctaaaatccccacgctgtttaatggcgcaggcggcgcatcactgccgggatctttcttcacgtccgtactggcaaaaaagatactacgcagcgcctggctttgtggcgtcatcgccagttcgccaaacgcccgagcttcggcgtcataaccgctgctggtgccctgcgctaatcccgtttcaacaacctccaggatgcgttctgtcgccggataattgccttgagttttgtgttctgttttcttgccgaccattttgaacagcagcgcacgacctaacggccccgccagaatacgctcgcgtacaggtagagggcgggaagatgggcgctccttctttgccagctcaacagcggcttccagcagaatggagtgcggaacaacgtcatccaccagccccagctttaatgcctgtttcgcccgaagttgttttccggtgaggatcatctctaatgctgtgctgacgcctatcagacgcggtaaacgctgggtgccgccactaccgggtaacaatccaagttgtacttcaggcaaaccgagcaccgttttaggatcgtcagtacaaacgcgaccgtggcacgccagcgccaactccagcccaccacccaggcaagcgccatgaatagccgcgataacctgaatgggcaaagcatgaatctccgccatcaactgttggccctgccgcgccagagcttccgcttcttgcgccgttttgcagttgccgatcatgttgatgtctgcgccagcaatgaagttgtccggtttagcggagacaaacaccacgcctcgcaactctttgttttcacggagttgcttaataatggcgcgcacctggctggcaaactccgccttcagggtattcattttctcacccggtacgtcgatggtgataacggcaatgttgtccagacgaacattaagggtaaacgcacttgtcatttccattattccgcctccagaaccattgccgcgccaagcccaccggcagcacaggcggtaactaaaccaaatccaccgccgcgacggcgaagttcatgcaatgtctgggtaatcatccgcgcgccggtcgccgcgaagggatgcccgtaagcaatgctaccgccaagcacgttaaatttgctatcgtccacttcgccagtggcatgtgcacgccccagtgcttcacgagcaaaacgttcactacccagcaactgaatattcgccagcgtctgagctgcaaaggcttcgtgcatatcgatcaatgtcagatcgctcatcgtcaaaccggcacgctccagcgccagcggtgtactccaggctggaccgagcaacatgtcctgccagacatcaatcgcagtaaatgcgtagctgcgcagataccccagcggcaccagccctaattctttcgcccgggattcagtcatcaggatcaccgctgccgcgccatcggtcagcggcgtactgtttgccgccgttaccgttccgtgtttgcgatcaaacgccgggcgcagctttgcgtaatcggcaaggctggaattaccgcgaatattgttgtcttcgacaagcggttgtttataaggagggataaaggcagtcatcacctcttctttgagttttccgtcactccatgcctgagcggcacgctgatggctacggtgcgctaatgcatcttgctgttctcgggtgatgccgtaggttttcgccatttgctctgcggtgtcgcccatccgcaagccggtagaatattctgctaccgcaggtggtacgggcattaagtcgcgcaaacgcaggcgagagaagagtttcagtcgctggctcatggtacgagctttgttgacatcaaccagcacgcgcgccagttttttactgacgccaattggcaatacgctagaggaatctgccccaccggcaatccccgctcgaatagttcccgccatcaggctttctgcgacgtttgcaactgcctggaaactggtagcgcaagcgcggctgacgctgtaagcatcggtatgtacattcattcccgtaccgagaacaatttcacgcgcaatgttgggggcttcaggcatttgtacgacctgaccaaagaccagttgttcaatcacttcggcggggatctcgctgcgtgccagcagttcgcctaccaccatcttccctaaatcaaccgcgggaatgccatgaaaagccgtcgcctgacgggcaaaaggcgtacgtaaaccgctaacaatggcgatacgatcgccctggcgggtaaccagcggtaaaacctgacccataacactcccctgtaaaaaaataaataaagtggtctgacctgatcatagtcttaaccatttttttacatttagccaagtggagaaaagggaaagtgggagctatgacacagagagaaaagaagaagagaaaagaaaacgcccctgccagcaactgacaggggcgtacgtacccgagaggaattaacgcagacccagctggaaaatcagcatttcagcttcgcaggcaaaagtgaaatcgatatccaggcgcacaccgtcagactcttcagtgaaagtcggggtgattttgcaaggttcagattccacgctacgggctttttcagtcagcgccgccagcgtttgctctgcttctgcgcggtttgcaaacacgcggctgtaagacgcggtgcagtcggagttgtccataatggtgccaacatccatacagcagcaaaccggggtttcatcagcactacatttactcatcgttgatttcctctgtatgtgcacccaaggtgccagataaacgttgtggatattttacgcttccggaaagtgctgctccagttgttaattctgcaaaatcggataagtgaccgaaatcacacttaaaaatgatctaaaacaaaattcacccgaatccatgagtgcgccacctccaaattttgccagctggatcgcgtttcttagatcatatttgaaaaaagatagaaacatacttgcaacattccagctggtccgacctatactctcgccactggtctgatttctaagatgtacctcagaccctacacttcgcgctcctgttacagcacgtaacatagtttgtataaaaataaatcattgaggttatggtcatgagccagaaaaccctgtttacaaagtctgctctcgcagtcgcagtggcacttatctccacccaggcctggagcgcaggctttcagttaaacgaattttcttcctctggcctgggccgggcttatagtggggaaggcgcaattgccgatgatgcaggtaacgtcagccgtaaccccgcattgattactatgtttgaccgcccgacattttctgcgggtgcggtttatattgacccggatgtaaatatcagcggaacgtctccatctggtcgtagcctgaaagccgataacatcgcgcctacggcatgggttccgaacatgcactttgttgcaccgattaacgaccaatttggttggggcgcttctattacctctaactatggtctggctacagagtttaacgatacttatgcaggcggctctgtcgggggtacaaccgaccttgaaaccatgaacctgaacttaagcggtgcgtatcgcttaaataatgcatggagctttggtcttggtttcaacgccgtctacgctcgcgcgaaaattgaacgtttcgcaggcgatctggggcagttggttgctggccaaattatgcaatctcctgctggccaaactcagcaagggcaagcattggcagctaccgccaacggtattgacagtaataccaaaatcgctcatctgaacggtaaccagtggggctttggctggaacgccggaatcctgtatgaactggataaaaataaccgctatgcactgacctaccgttctgaagtgaaaattgacttcaaaggtaactacagcagcgatcttaatcgtgcgtttaataactacggtttgccaattcctaccgcgacaggtggcgcaacgcaaagcggttatctgacgctgaacctgcctgaaatgtgggaagtgagtggttataaccgtgttgatccacagtgggcgattcactatagcctggcttacaccagctggagtcagttccagcagctgaaagcgaccagtaccagtggcgacacgctgttccagaaacatgaaggctttaaagatgcttaccgcatcgcgttgggtaccacttattactacgatgataactggaccttccgtaccggtatcgcctttgatgacagcccagttcctgcacagaatcgttctatctccattccggaccaggaccgtttctggctgagtgcaggtacgacttacgcatttaataaagatgctagtgtcgacgttggtgtttcttatatgcacggtcagagcgtgaaaattaacgaaggcccataccagttcgagtctgaaggtaaagcctggctgttcggtactaactttaactacgcgttctgataacgcgttcgcctggataaagtcacctgcatagcaggtgactttaactcccccacttcaccgaaagtagtgtcctcattgcttacctcctgagttttgcaaacagcctgttggcagcttgccctttcaaatcaataagcggtatccacagacaaacctgaagggaaaggcatattttcaggcgttctgctcgtccttctcaaagagtttacttttctgcatttccaggatactccccccccctggctattgtgcgctcatacactcaaattaaagataggttctaaataaatgagcgttttttgatagtctatttcattaggtaatatatatttgtaacaaatcaatcaaaatggaataaaatcatgctaccatctattagtatcaacaataccagcgcagcttacccagaatccatcaatgaaaataacaatgatgaagttaatggattagtacaagagttcaaaaacctttttaatggtaaggaaggaataagcacctgtattaaacatctacttgagcttataaaaaacgccatacgagtaaacgacgatccttatagatttaatattaataattccagtgttacttatattgatattgactccaatgatacagaccatattactattggtatcgacaaccaagaaccaatagaattacctgcgaactataaagacaaagaactcgtccgtactatcattaatgacaacatagttgagaagactcatgatatcaataacaaggaaatgatcttcagcgcattaaaagaaatatatgatggagatcctggttttatcttcgataagataagtcacaaactcagacatacggtaacggaatttgatgagagcgggaaaagcgaaccaacggacttatttacctggtacggtaaagataaaaaaggcgactctctcgctattgtaattaaaaataaaaacggaaatgattacttatctctcggttactacgatcaggacgactaccacattcaaagaggaattcgtattaatggtgatagtctcacccaatattgtagtgaaaacgccaggagtgctagtgcgtggtttgaaagcagtaaagctatcatggcagaaagttttgcaactggttccgatcatcaggttgtaaacgagctcaacggggaaagactgagagaaccaaacgacgtttttaaacgttatggtcgagcaataagatatgattttcaagtggacgatgcaaaatataaatgcgaccatctaaaagaaatagtttctactttagtcggtaacaaaattaacgttggccattctcaaaaaatatataagcattttaaggatctcgaaggtaaaattgaagaaaggcttcaaaatcgccaggctgaatatcaaaatgaaattaatcaaccatctgcgccaggtgttaattttgatgatatttaaaattatttttccagttttttgatttttcaacagctgaatatcggaaatagtcagtgacgaacatcagtatttttacataattacgtctaggtcattgtcggtttatctccttttacttgtggtaattgagggataacaacaaaaaaggtgagttttgcgactcaccttttttatttgtttcttattcagaatcaatatcttttaaatcatcctgaatcgcttgtgcgttcggattttcctgcggtttgagttcgccgccattagcgatgaaatcatgacgctggaagtacgcttcgcgcaccataatataaggatcggagctctgacgcagcagaccatcggaatccagcagctgagcgcgggtttcgatcccttcaagcgtccatttacccacagacatcggccaggtcagccaggaaagaaccgggtaaaaaccatccgccatatcaccaccgtcatcacgcagcgtgaagctaccgtagaacggtaactgaacgtaaggcccataacccacgccataatgaccaagcgtactaccgaagcggtgaggttcagtccgttgcagtttcgggttcgccatccctgcaacatcaataaaaccgcccatccccaaaatggtgttcaggaaaaagcgggtaaagtggaccatcccctgataagggtcgccctgcaagaagtagttaaccatcaccgcaggttcttcaaggttgccagtaaagttgctcaaaccgttacgcgccggttgcggaacataatcacgccaggcgacagcgaccggtcgaacaatatacgggtctaatacattgaagttgaagttgtacatggtgcggttgaacccttctaacgggtcagaacgcccttgctgatctgtaccggaactcgcacaccccaccagaagcgtagttcccagagcaagcgcgctcaggcgaagcttcataaatgtctccctgtttttttatggcttatgcagtttgccatccatgacggaacgataccgtatccgcctgtttaggtgtgggcgattgtaacagcacgtcaactgatgtccagacgccctgatttgctgatttgatcatagcctggtaatcgccgccctgtaggctacttgattctatagaaacagaaaaaggcaaacgcagccttttctacattttcagagtaactcccgtcagttgcgagcaaaaaagccgctacgctttagctatacgtgctaattcaagagaagagaccatggacaacgacaaaattgatcaacacagcgacgaaattgaagttgagagcgaagaaaaagagcgcggcaaaaaaatagaaatagatgaagaccgactcccctcccgggcgatggcaattcatgagcatatccgccaggatggtgaaaaagagctggaacgcgacgcaatggcgctactgtggagtgccattgcggcgggtctgagcatgggcgctagcttactggcaaaagggatatttcaagtcgaactggaaggtgtgccgggcagcttcttgctggagaatctcggttatacctttggttttattatcgtcattatggcccgccagcaattatttaccgaaaataccgtgactgcggtactacccgtcatgcaaaaaccgacaatgagcaacgtcggcttacttatacggttatggggcgtcgtgctgctgggtaatattctcgggacaggtattgcggcgtgggcatttgaatatatgcctatcttcaatgaagaaactcgcgatgcatttgtcaaaatcggcatggatgtgatgaagaacacccccagcgagatgtttgccaacgcgatcatttccggctggctgatcgccactatggtttggatgtttcctgcagcgggtgcggcaaagattgtggtgattatattgatgacctggcttattgccctgggtgacaccacccatatcgtggtcggttctgttgaaatcctctatctggtgtttaacggtacgctgcactggagcgatttcatctggcccttcgcactacctactttagcggggaacatctgcggcggcacctttatcttcgcgttaatgagtcatgcacagattcgtaacgacatgagcaataagcgtaaagcagaagcacgccaaaaagcagaacgtgcggaaaacattaagaaaaattataaaaacccggcataaatggcgagggtttaagcaatcgagcggcagcgtacttaccccgcactccattagcgggtatactcatgccgcattgtcctcttagttaaatggatataacgagcccctcctaagggctaattgcaggttcgattcctgcaggggacaccatttatcagttcgctcccatccgtaccagtccgcaaaatcccctgaatatcaagcattccgtagatttacagttcgtcatggttcgcttcagatcgttgacagccgcactccatgacgggtaaaaagtggataaaataattttacccaccggatttttaccctagagccatacagcctcacactcgatgaggcctgtcagtttcttaaaatatcctgatctaccatcgccgtcatagagcgtatttttattacctgatttgcaggttcgattccctattcggagatagcactcatgcaacacgaactacagcctgatagtctggttgatttgaaattcatcatggctgatactggctttggtaaaaccttcatctatgaccggattaagagtggcgacctgccaaaagccaaagttatccacgggcgagcaagatggttatatcgtgaccattgtgaattcaaaaataagctcttaagccgcgccaatgggtaaaatagcgggtaaaatatttctcacatctaaaaaacaccattccaatcaatcccctgctgcttcaagtagatgtctgcaggggacaccatccttgtgtttatccctaaaaccacataaaaaccgtaaattaaattcgaactagcaggccgaataaggcacaccaggaactcgtggttttattcattaactagtggtttttacctgttctcttagccagataataaacgcttcaatttttggccactgcctgcccggtaatgtggtgatgtaataatgctgatggcatttcaccgtcatatcgccaaacggcgcgacgagctcaccactggcaagccttttttgtaccaggcgttttcttcccatcgccaccccaatatgattcatcgcggcaataacagctaaatcagaacgatcaaagccaattccagaagatgtcggcaaattaaccgcataatgttgcgcccaactatgccattcatccgtaccggagtcgttgctccatgcctgtctgtcatggagcaacgtacagtgacacaggttaattaccgtgttggttaaagcatgtctttgagcgtattccgggctacatactggcaggatttcttcatccatcagaaagtgatgagtgagttgcgcactcggcgcatcatcaaagtagatcgccaaatcgattccggcacgttgcagattgacgttgtcattaccagtgagcacggtgaggctaatagacggataccggcgtgtaaagtcacctaatgcgggcaccaaccagcattgggcgatagagggccgggaatacagagttaacgttccgcttaactcctgatttttgatatcaagaatttcctggttcagggtatccaggctgctttttagcgcccaataaacacgtttcccctcgtgcgttaattccactttgcgatgggaacgaacaaacaactgaatgcccaattcttcttccagctgattgatacggtgacttaccgcactggggctcaggctcaattcctctgccgccagggcgaaggactgatgcctggcagccacttcaaaagtatgcattttacttaattgccagccgttaagcagccgatttcttatttcacgaaggggttccataatcacctcatttttcgcttaagtgtaaaaaaatagcggcaaaatttcagctatgagatgagctaaagtgaaccatatctcaattcaccttcatttttagatgtaaatcactccattgatgcaatttacctcatgtgaaaggcaaattttatcgtttgtcagcctgcgttgtttttttgtccaatatcatcaggttaatcacaggggaaggtgagatatgcactctcaaatctgggttgtgagcacgctgcttatcagcatcgtgttaattgtactgaccatcgtgaagttcaaattccacccgtttctggcgctgttgctggccagcttcttcgtgggaacgatgatgggcatggggccactggatatggtaaatgctattgaaagtggaattggcggaacgctggggttcctcgcagcggttatcggccttggcacgatactgggaaaaatgatggaagtatccggggccgcagaaagaattggtctgacacttcaacgctgccgctggcttagtgttgatgtcattatggtgctggttggcctgatttgtggcatcacgctgtttgttgaagtgggcgtcgtgctattgattcctctggcttttagtattgccaaaaaaaccaataccagtttattaaagcttgccattccgctatgtaccgcattgatggcagtgcactgcgtggttcctccacatccggctgctttatatgttgccaataagctgggcgcagatatcggtagcgtgatcgtctacggtttgctggttgggctgatggcaagtctgatcggtggcccacttttccttaaatttctgggtcaacgactgccctttaaacctgtacccacagagtttgcagatctcaaagttcgcgatgaaaaaacactaccgagtttaggcgcaacgttattcaccatactgctacccattgcgctgatgttggttaaaacgattgccgaattgaatatggcgcgtgagagtggtttgtatatcttggttgagtttattggcaaccctatcactgccatgtttatcgccgtgtttgtcgcctattatgtgttgggtatacgccagcatatgagcatggggacgatgctcacacatacggaaaatggcttcggttctattgctaatattttgctgattatcggggccggaggcgcattcaacgccattttaaaaagcagcagtctcgctgatacgctggcagttattctctccaatatgcatatgcacccgattcttctggcctggttagtggctcttattctgcatgcggcagtgggctccgctaccgtggcaatgatgggggcaacggcaattgttgcacccatgctgccgctgtatcccgacatcagcccggaaattattgcgattgctatcggtagtggtgcaattggctgcactatcgttacggacagccttttctggctagtgaagcaatattgcggcgctacgctcaatgaaacatttaaatactatacgacagcgacatttatcgctagtgtcgtcgctctggcgggcacattcctgctgagttttatcatctaagcgcaaagagacgtactatggaaaacgctaaaatgaacagcctcatcgcccagtatccgttggtaaaggatctggttgctcttaaagaaaccacctggtttaatcctggcacgaccagtttggctgaaggtttaccttatgttggcctgaccgaacaggatgttcaggacgcccatgcgcgcttatcccgttttgcaccctatctggcaaaagcatttcctgaaactgctgccactggggggattattgaaagtgaactggttgccattccagctatgcaaaaacggctggaaaaagaatatcagcaaccgatcagcgggcaactgttactgaaaaaagatagccatttgcccatttccggctccataaaagcacgcggcgggatttatgaagtcctggcacacgcagaaaaactggctctggaagcggggttgctgacgcttgatgatgactacagcaaactgctttctccggagtttaaacagttctttagccaatacagcattgctgtgggcagtaccggaaatctggggttaagtatcggcattatgagcgcccgcattggctttaaggtgacagttcatatgtctgctgatgcccgggcatggaaaaaagcgaaactgcgcagccatggcgttacggtcgtggaatatgagcaagattatggtgttgccgtcgaggaaggacgtaaagcagcgcagtctgacccgaactgtttctttattgatgacgaaaattcccgcacgttgttccttgggtattccgtcgctggccagcgtcttaaagcgcaatttgcccagcaaggccgtatcgtcgatgctgataaccctctgtttgtctatctgccgtgtggtgttggcggtggtcctggtggcgtcgcattcgggcttaaactggcgtttggcgatcatgttcactgcttttttgccgaaccaacgcactccccttgtatgttgttaggcgtccatacaggattacacgatcagatttctgttcaggatattggtatcgacaaccttaccgcagcggatggccttgcagttggtcgcgcaagtggctttgtcgggcgggcaatggagcgtctgctggatggcttctatacccttagcgatcaaaccatgtatgacatgcttggctggctggcgcaggaagaaggtattcgtcttgaacctagcgcactggcgggtatggccggacctcagcgcgtgtgtgcaagtgtaagttaccaacagatgcacggtttcagcgcagaacaactgcgtaataccactcatctggtgtgggcgacgggaggtggaatggtgccggaagaagagatgaatcaatatctggcaaaaggccgttaataacgtttcaacgcagcatcgcaatcctttccctgggtgagcgatgctgccgatggcgcagacttaagatccccggtcttacccgctataaccccctccttttatcatcacccaacgcctttcgctgtaaacggcggtttcgcaaaccaaaccaaaaccgtaagtaagataaaagcaatagccgccatacggaaaatctcatttgcagaaatagaaagactctgctgggttatttcattattaatttcattaagaactccactaaggctaccataatatttatccataatttgactgctactattaaacacggggttaaattgatcgatggttgctgtcaactgactatggtgtaagctttcgcgtcgtccccacagcgtcattgtcaagctcgtaccaacacttccactcaaggtacgaaaaaaattactcatactgctggcattggcaaatttattatctggcaagccactaaagctaatcgttgttaagggtaaaaagaaacaggcaacggcgaatccctgaaaaaactgcggcaaaatgatgcctgtaaaatcaatcgttggcataaatgtcacagaacgccagtaatagcaaaccgcatacatcaaaaaactaaatgtcactaacaaccgcatgtctattttgttgccataacgtcctatcaaaggactaattaatagtggcatgatgccgatgggcgcataagcaagtccggcccatatcgcattataccccatcgtttcctggagtaactgcggcataaggacgatcgctccagagtaaaataaatacgcgcatgtgatactcacaataccaatggtgaagttacgggacttaaacaaactgagatcaagaatcgggttctcactggtgctctcccaaatgactaaagagatcagagaaataacacttactactgttaatattattattgtactgctgttgaaccaatccagatcgcgccctttatcaagcataatttgcaagccaccaacaccgagcactaacagggtcagtcctggtagattcattttgaccggactagtctcagtttctcttcctttaagtaaggttaagcataatgtcaggacgataatccccatagggacattgattaaaaatatccaaccccagctaaagttatcacaaatataaccgcccaatatcggcccacatatcggagcgataatcacggtcatactccataatgccagagcaaatgttcttttttctggcggataattccttaataataaactctgactcagtggaattaacggccccgccattaacccctgaacgactctaaaaaatatcagcacatcaagattggtgcttaggctacacattaaactagacaggctaaaaaaagtgacactaagtaaaaataatcttaattcgcctattctttgtgccaacctgccagtaacagggatcgcaatggcatttgctacaccaaagctggtgataacccaggtgccttcgtctgtacttgctcccagaaagccagatattgtcggtattgcgacgttagaaatagtggaatccaacatttgcataaatgtcgctaaactcaatgcaatagtgacgcaccataacgtcccaccggttaatggtgccggagtacttttagtgattgccattaaagttgtccattatggctaataatgttgctaatttctttttctatcggactggtatcgataactaaagccttactggtataagccggcatggaggtcacggtactagccagctcaggcatctcggcaatgtcttcgttcttcgtatcaatagttgctgtcatgcttaaaccaatacgcaaggggtgttccatgagttcttttggatcaagagaaacttcaaccggtacacgctgaacgattttgatccagttccctgtcgcattttgtgcaggtaataaggagaacgcattgccggttcccatattgatccctgtcacccgaccatgaaacacaacattttcaccataaagatcgctgataatattgacgctttgaccaatccgtacatccgtgagttgtgtttctttaaagttggcattaacccacatttgacgtgccggtacgacagccattaagctttgtccggggctcactgtttcgccgacctgaacacttctctgggcaatatagccggtaaccggactcttaatatccgtacgtttaagcgccaaccaggcttctttagttgcatccgccgcttcaacgacttgtggctgacggtttaatggtgtgttcattactaaagctttattcgctttataagcctggatagcggcattcaatgccgctttgctacttattaacgtatctttggtatgctccagcgtttctttactaataaccccctgcttcgctaacggcactcgacggttataatcttctaaagattgttgatactgaatacgtgcactagcgacttcggcactgtattgtttatcctgtaagtatagtttattcgtttgccgaacaatatttgccagattatttttagctttattgagtgcgatagtggcatcagttttatccagactaactaaaatgtcaccttgtcgaacgtagttcgtatctttatgattaacgacagtgacactaccactgacttgtgcagaaattggatctgcattccccgtgacataggcgtcatctgtactaatcatgtcttctaattccatactccaataggcataggcaccactaaacgcaataaataaaactaccgccaataaagaaaagtattttcttctgttagaatgttttttattactattaatctgttccactattatctctcatttctcatagatgaaatttatgaattgaatgaaaagagcattcattcttcatatcaaacacagtgcatgtgttgcacattatcccaggaacgttggaggcctaatttaaatgaggtgcaaaaaaaacaacagaggactaaaccgtggcttttgcaatacaattcttacgcctgtaggattagtaagaagacttatagtgccaacttgaaactataaatcatcggtacaatccctgattttattgttgacatttcatttatgccgactatttatatggtatacttgtcgaattatcttaaaggaagctcagattttcttatttttattgagaaaatgagatgacgccttatgtctgtattactacagggagaagggagatgcttcattgcaaagggaataatctatgaacgcaataattattgatgaccatcctcttgctatcgcagcaattcgtaatttattgatcaaaaacgatattgaaatcttagcagagttgactgaaggcggaagtgccgttcagcgggtggaaacacttaagcctgatatcgtcatcattgatgtcgatatccccggagttaacggtatccaggtgttagaaacgctgaggaagcgccaatatagcggaattattattatcgtctccgctaaaaatgaccatttttacgggaaacattgtgctgatgctggcgctaatggtttcgtgagtaaaaaagaaggcatgaacaatatcattgcggctattgaagctgcaaaaaatggctactgctatttccccttctctctcaaccggtttgttggaagtttaacgtccgaccagcaaaaactcgactccttaagcaaacaagaaattagtgtcatgcggtatattcttgatggcaaggataataatgacattgctgaaaaaatgttcatcagcaacaaaactgtcagcacttataaaagtcgcctgatggaaaaattagaatgtaaaagtctgatggatctttacacattcgcacaacgtaacaaaatcggctaaccacatgaagtttttaccctatatttttcttctctgttgtggtctttggagcaccataagtttcgcagacgaagattacatcgaatatcgtggcatcagtagtaacaaccgtgtcacacttgatccactacgtctgagcaacaaggaattacgttggttagcgagcaaaaaaaatcttgtgattgcagtacataagtcccaaacggctacgttgttgcataccgatagccagcaacgggttcgtggtattaatgctgattatttaaatcttttaaaaagagcgttaaatatcaaattaacactccgggaatacgcagatcatcaaaaagcaatggacgcgcttgcagaaggtgaagtcgatatagtgttaagtcatttagttactagcccgcctcttaataatgacattgctgcaaccaaaccattgataattacctttccggcgctggtaaccacccttcacgacagtatgcgaccgcttaccagtccaaaaccagtaaatattgctcgggtagcaaattaccccccagacgaggtaattcatcaaagttttccaaaagcaacaattatctcttttacaaatttatatcaggcattagcatccgtcagtgctgggcacaatgattactttattggtagtaacatcattaccagcagtatgatttcccgctatttcactcactccttaaatgtagtgaaatattataacagcccgcgtcaatataattttttcttgaccagaaaagaatctgtcattcttaatgaagtactcaatagatttgttgatgctttaacaaatgaagttcgctatgaagtaagtcaaaattggcttgatacaggaaacctggcctttctgaacaaaccattagaactcactgaacatgaaaaacagtggattaagcagcatcccaatttaaaggtgctggaaaatccttacagccccccctattctatgacggatgaaaatggcagcgttcggggcgttatgggggacattcttaatattattaccttgcaaacaggtttaaatttttctccgatcaccgttagtcacaatatccatgctggaacacagcttagccccggaggatgggatataatacctggcgctatttatagtgaagatcgagaaaataatgttttatttgctgaagccttcataacaacgccttacgtttttgtcatgcaaaaagcgcctgacagtgaacaaacattaaaaaaaggaatgaaagttgccattccatattattatgagctgcatagccaattaaaagagatgtatccggaggttgaatggatacaggtcgataatgccagcgctgcatttcacaaggttaaggaaggtgaacttgatgctctggtcgcgacacagctaaatagccgttacatgatcgatcattactatcctaatgaactttatcattttcttattcctggcgttccgaatgcaagccttagcttcgcttttcctcgcggagaaccggaacttaaggatattattaataaagcactgaatgcaattcccccaagcgaagttctgcgcctgacggaaaaatggattaaaatgcccaatgtgaccattgacacatgggacctatatagcgagcaattttatattgttacgacattatccgttttattagttggcagtagccttttatggggattctacctgttacgcagtgttcgtcgtcgtaaagtcattcagggtgatttagaaaaccaaataagtttccgaaaagcactcagcgattccttaccgaatccaacttatgttgtaaactggcaaggtaatgtcattagtcataatagtgcttttgaacattatttcactgcggattactacaaaaatgcaatgttaccattagaaaacagtgacagtccctttaaagatgttttttctaatgcgcatgaagtcacagcagaaacgaaagaaaatcgaacaatatacacacaggtatttgaaattgataatggcatcgagaaaagatgcattaatcactggcatacattatgcaatcttcctgcaagtgacaatgcagtatatatttgtggttggcaagatattactgaaacgcgtgatctaattaatgcactcgaggtagaaaaaaataaagcgataaaggctaccgtagcaaaaagtcagtttctggcaacgatgagtcacgaaataagaacaccaataagctctattatgggcttcctggaacttctgagcggttctggtcttagcaaggagcaacgggtggaggcgattagtcttgcctacgccaccggacaaagtctcctcggcttaattggtgaaatccttgatgtcgacaaaattgaaagcggtaactatcaacttcaaccacaatgggtcgatatccctactttagtccagaacacttgtcactctttcggtgcgattgctgcaagcaaaagcatcgcattaagttgcagcagtacgtttcctgaacattacctggttaagatcgaccctcaggcgtttaagcaggtcttaagtaatttactgagtaatgctctcaaatttaccaccgagggggcagtaaaaattacgacctccctgggtcacattgatgacaaccacgctgttatcaaaatgacgattatggattctggaagtggattaagccaggaagaacaacaacaactgtttaaacgctacagccaaacaagtgcaggtcgtcagcaaacaggttctggtttaggcttaatgatctgcaaagaattaattaaaaatatgcagggcgatttgagtttagaaagtcatccaggcataggaacaacatttacgatcacaatcccggtagaaattagccagcaagtggcgactgtcgaggcaaaagcagaacaacccatcacactacctgaaaagttgagcatattaatcgcggatgatcatccgaccaacaggctattactcaaacgccagctaaatctattaggatatgatgttgatgaagccactgatggtgtgcaagcgctacacaaagtcagtatgcaacattatgatctgcttattactgacgttaatatgccgaatatggatggttttgagttgactcgcaaactccgtgagcaaaattcttccttacccatctgggggcttacagccaacgcacaggctaacgaacgtgaaaaagggttaagttgcggcatgaacttatgtttgttcaaaccgttgaccctggatgtactgaaaacacatttaagtcagttacaccaagttgcgcatattgcacctcagtatcgccaccttgatatcgaagccctgaaaaataatacggcgaacgatctacaactgatgcaggagattctcatgactttccagcatgaaacgcataaagatctacccgctgcgtttcaagcactagaagctggcgataacagaactttccatcagtgtattcatcgcatccacggtgcggctaacatcctgaatttgcaaaagttgattaatattagccatcagttagaaataacacctgttagtgatgacagtaagcctgaaattcttcagttgctgaactctgtaaaagaacacattgcagagctggaccaggagattgctgttttctgtcagaaaaatgactaaatagcggctcccacaatgttcaaatgtgggagctatttaccagcacatcttacatttaactactgaactcctggcgaatttgttccccatgctggtcgagcgttgccgctcccggcataacatgcgggtccgcgcagccgctgatttttatcggattacccggcatcattattcccccggcttcaatcaacatatttctcgcctgagtttgtggcaatttaatggcctcagccacacttaataacggcgcgacgggtacaccaacttcatgtattctggctaaccaaacttcagctgcctgcgtttttaacgtccgctcaatatattgtttaagaatagcctggttttgtacgcgtaaaatattgctgctaaatcggggatcattaaccagttccgtaagctccagtgcctggcataacgcagaaaaaagcttgtcattaccacaacaaatcgtaatcggcttatcctgagtattgaaaacatcaaaaggtgccatgtagggatggcgatttcccagacgttgtggactcttcccagttgcgatatatgccatcagaccatgctccagaaaactcagcgtggcatcaaacatcgctatatcgacatgcgcccctctctggctcttttcgcggccataaagtgcactcactattccgctgaataaatagacaccgccgcatagatccgcaagagatgtaccaacgcgcactggcggagcatcaggatatcctgtttccatcattatcccgctcattgcctgaatgatggtatcgtaggcaggagcatcttttagcggaccggtatgtccgaaaccactgctactagcatatatgaggcgcgggttgatttcttgaagcgtttcccaactaaaccccagtttttccattgtacctgggcgaaaattctcagctaatacatcagcttgtttgagcatatttataaatatacttttatcgtgatcattctttaaatcaagaaccacactctctttgccatgattaataaaactgtaatagagactctgtccatccacatagggaccaaatgtgcgggtatcatcaccatgacccggcggctcaactttaattacccttgcgcccatattacaaagaagttgagttccgaaaggtccattaaggacatgtgtcatatcgataactaataagccttcaaacggccctttgctttcattatttgtcatttgcttatgccttgaaaaaagccgaaggtgaaaagacacttcggcatttatgtaaaatcaataacatgattaattaactaaccagtcgactgacataaatccacaagggagccgtgacgacaaagcccagtacgctcacagccaaactcgctgtaccagtacgggtgtagacattaaaccggctggcaataatgattccggagaatgccggcggtaatgcgcctgccagtaccatcatctgcagatgttcgctgttcaaatgacatgccataccaacgagaagcagtgccagtggcatcagaatcagcttcaggaaggtgttataagcaatttcggcactgaactcgaatttatgtgcagccagagtcaaccccgcagcgaataccgctaccccactgttagccttcgcaatcagattaaaggttgggtcccatgctgccggaatttttaccccaaccaacaccaggatcgttgccagaacaggtgcccatactactggctcctttgccgcagaaattaatgcgctcagattactattcttcttaccatccgctccactagaaggattcagcaaatacagaccaataggaatagtaattgcgttaacaataatagaaataattgctaccactaaacctgtacttacggaatcaccataaataggatcgagaactgcaaaccccaggaatccaatggtaggactacctgcaattaatgcacatacagctgcttctgcatgggtacgtttaaaaaatttgtagcaaccgaaccaggagaaaaagaaacatccgacaataaccacaagacttacaagggtcagacgagtgtccgcaaaaatcatttccctgtttgcccgagtaatagatacaaatagagccgcaggaagcgcgtagtttaataccagtttattaaatgcccgagcttgatcttcactaaatgtttctcgtctgccgctaaaataacccaacagcatgattacgataataggcaataaatcgccaataaaaaatgttagcataatagtatttccgataagggtcccctcaccatcgcataatgagttggcaagaggagacgatgtcagtatttaattaccagcgacttgttttgggttaagtttggtaatatggccactttcagttcctgctgcagggtcgatgaccacattaataatggtcggtttgcggctctgaataccggtggttaaagcatgacgaagttcatctgtcgtggtgacgttatagccaacgccacgaaacgcatccattaatttgtcataccttgcatggtgcaacagatccgttggacttggtgcaccagcgccactgagatcaacaccgtctcctctgtagatgccgccattattaaaaataacgatcgtcaccggcaggttatatcgacaaatcgtttcaatttccatcccactgaaaccaaaagcactatcaccttcaatggcgacaaccggagaaccagaagtcacgctagcaccgatggcatagcccataccgatgcccatgacaccccaggtaccacaatccagacgacgacgtggtttatacatatcaataatatttcgtgcattatccagggtatttgcaccttcattaactaaataaatatcctggttctcgcgcaatacgtcgcgcacagcacttaatgcattaaagtaatttaatggttgagtatctgtacttaatttttcatgcattttttgtgcattttgctgcttgtggatatttaaaatatcgcgccataccagtggagtcgtaaatgtgttttgtttcagttctgccagcataccttgcatactggatgcaatatcaccaacgactggcacagcaatggggcggttgctgtcaatttcctgcggttcaatatccagttgaataaactgtgtatctgccgcccatccttttttaccgtgtgccaataaccaattcagtcgtgcaccaacaagcatgacaacgtcagcatttgccagggcaaagctacgcgcagctgccgcagaaagtggatgcgtatcttcaaggatccctttcgccatagacattggcaggaatggaatctgagcactttcaataaattcacgaagctgttcatcagcttgactatacgccgcgcctttgccaaggataattaatggccgttcagcttttgctaaaaggctaattgcgctagtgacactcttcgggcatggcaataatgctgggctcggattttcaactttaacaatcgtggttaacgcttcgtctttttccatcgtcgcggccaggacatttgctggcaaatcaagataaactccgccagggcgaccgcttacagagacccggatagcgcgtgccaatgcaatgccaagatcctgcggctgattaacgcgaaatgctgctttggcatacggttttgccgcattcatttggtccagctcttcataatcaccttgctgtaggtcgacgatcgcgcggtcgctggagccgctaatcatgatcatcggaaaaccatttaccgttgcgttggccaatgcggtcaaaccattgaggaatcctggcgcagaaactgtcaggcagatccccggtttttgggtaagaaaaccgcttgccgcagcggcatagcctgcgctctgctcatgacgaaaaccaatataacgaatgccttccgcctgggcatggcgtgccatatccgtcacaggaatacctacaacaccataaatagtgtcaatattattctgttttaatgcttcaacgatgatatgcataccatctgtcatttgaagttgatcactcatgattaataacctcgaaatttttataaattgggagccagaagcccccgttaatatcagatggcgtggttttgcttcattgcagcaatttcatcgtcgctataacccagctcctgcaatacagcagcggtatgttcacctaatagcggcgcagctttaatatccggcgtaaaggcagagaatttcattggacaaccaacggtcagatattttccacgcaacggttgttccacttcaacaacactgccactttggcgcaaagagggatcaagactaatttctttcatacttaaaaccggtgcacaaggaatatcaaactgagtcaaataggccaccgcttcatgtttatcaatagtgacagtgtatttttcgatttcagcaaaaatatcgaaaatatgtggctgtcgtgcatgggctgtactgtatgccggatcggtaatccattctggtttgccgatggctttacaggtgttttcccagttttgctcctgaatagtgaaataaatataggcgttaggatcggtttcccagcctttacatttcaggatccagccaggctgaccgccaccacctgcattaccaccgcggggaactgcatcaccaaatgtaccattcggatactgcgggtattcttccagataacccaatttatcgagacgctgctggtcacgtaatttcacgcggcaaaggttcaatacggcatcctgcatactcatggtgactcgttgcccacgccccgttttttcgcgatgcagcaaagcagcaagtaaaccgatcagcaaatgcattccggtgttgctgtcacccaacgctgcagcgcttaccagcggcggaccatcccaaaaacccgtagtggatgccgcgccacccgctgcctgagcaacgttttcataggcttttacattcacataagggctacactcatcaaaccctttgatgctaccaaaaatcagacgtggattgatttcttgaatatgctcccaggtgaagcccatgtgatcaatggcccctggatgaaagttctcgactaagatatcagcttcgcggatcagcttttccattacctctttgccttccgctgttttggtatttaactcaatagaacgtttgttactgttaagcatggtgaagtaaagcgcatcgatatcaggaatatctcgcagctggtgacgcgttacgtcaccaacgccgggacgttcaattttaataacgtcagcgccaaaccaggccagcatttgagtacaagatgggccagattgcacaccggtgaaatcgagaactttaattccttgaagtggagtactcatagcaatacctattagttaattaaatatgtgttaatttagcgtttatttaaggcgtaatatcttctataaataacccgcaaaatatcgtcgtagctgcactcgatatttttaaaatcctgtatcaagtgctgaaaatcatttcatcgccacttccaattcctttctgcatggtaagtagtgaggacgaaaagaagaatatgataaatattgattcgtggtaatcagagagagtcgcgacatttgtgatgttattcttacaactgtaagaagcgccggtgatttacaagcaagggtatgattacgctttttaaagcgtaccataaaacataacataataaatgatttgtgatgacacgggattattgcggtttactttgaggaatataaaatgcgagtttatagcaccgcgagcgccaaataattttatgaccacaacctgtcgtattgtggtcataaaaaattgtcggctggagggagttaaatcctttacctcaatatactgcctgtcagcattagttcacaaacagtgcttcgctatcgacgatgattccatcttccgcacctttaagcgccaggtttgcctcgtagtattgctttttatcaagcagtttctgcgcatcagcaagtgcattacgagtctgtttaagtggcatcagatattggttttccattacgccaacaccggccaggcgaagctcttccattgcgccctttttatcccctttcgccattttttcattggcaatttttatcgcggcttctttttcgggagttgctacataactctcagaaattccgacagatgcattaatgacaatatattggtcatcattgagattggtctttttacctggcttagcgaactttgcccattcggtactgtcatcactcagcaaagcggaagcttcattggtcagttcttttgccttttctggatcgccatgaaacagagccaggcgcgctacctgcacgtcacgcatcgcatataaaccttgttcagagatacgctctgctgccgctgccgttttctgggtttgctgaacttgctgagtttgctgttgtgccgctaccggagcattatcagcagcccatacagtactagatgccagaattgctgtgaccatcgtggccataattaaacgtttcatacttacctcattctttaacagttttagaaaacgccgccatcatattgggtgagcatgaaatgagaaatcagagagcaacggtcattttgaaagggttatcttacagttgtagttattatcgcaagaagtattttagtcttacaattgtaggaatatgcttcctgtcgcagagaactattcttatataccacaaagagatgtcatttattatatcgatgtaaatactgattaattaaatgtaaatacagccataacatcgtaggttctcagtgaaccattttcaggataactttctatgaaagtaaacttaatacttttcagcttatttttattggtctctattatggcatgcaatgtttttgcattttccattagcggtggtggaagtgagaggagctataaagagactgaaaaaacaagtgcgatgacgaccacacactctacaaaacttcagccaagtcaggcgattttgtttaagatgagagaagatgcgccaccattaaacctcacagaagaaatgccgcccccttttccgacaaaggcgaattatcttattcatcctgtgcgataacgtctttcacatggcaggtgaacaatcatgtctgatgctgatgtgaacacctgcccaaatgagccatcctgacccattaccgcctgccataccccaccataaagcgaatcatcaagccacaagccggggcaagaaacataaatatccccgtcactagttcattaccgccagttaaccacatggtgaagtaataaatgagtgcagcgaggatcaccatgccgaagaaagaagagaccgcgcttaccacgttcagtacctgaccgatgtagccgcttacgcagacaatacacagggcgagaaacatccataaattaatcatagctcaacctcctgccgcgctaaaaaacctgtaacttcagtcactttaatagtaagacaatccttaacctctggcaatttttgctaagcatcaatgaaaacagcatgttaaatgcaagactgttgtgtacggaaaaatatttactttgcacgattaataatcagtagctgaaagcagtcagcgagtgataaagtacagataccgcattcatgctcctcgtggttatgtcctgactagtctttacactctttacaggaaccattgtcgtacatgatggcccaaccaattgagtgtaccgctgtcgacatggaatcttctgcgatacaacaattcgtatctacagaaggtaactatgtttccacaatgcaaattttcccgcgagtttctacatcctcgctactggctcacatggtttgggcttggtgtactctggctttgggtacagcttccttatcctgttctctgctttctcggcacgcgtattggcgcaatggcgcgaccattcctgaaacgtcgtgaatctatcgcccgtaaaaacctggaactttgtttcccgcagcattctgcggaagaacgcgagaagatgattgccgaaaactttcgtagtctcggcatggcgctggtagaaaccggcatggcatggttctggcccgacagtcgcgtacgtaaatggtttgatgttgaagggttggataaccttaaacgcgcacaaatgcaaaatcgcggcgtaatggttgtcggcgtccattttatgagcctggaactgggcggccgcgtgatgggactgtgccaaccaatgatggctacctatcgtccacataataatcagctgatggaatgggtgcagacccgtgggcgcatgcgctctaacaaagcgatgatcggcagaaataatctgcgcggcattgtcggtgcactgaagaaaggtgaagcggtatggtttgctcccgatcaggattatggtcgtaaaggcagctccttcgcgccgttctttgcggtggaaaatgtcgccacaaccaatggcacctatgttctctcccgtctctctggcgcagccatgttgaccgtaacgatggtaagaaaagcggattacagcggatatcgtttgttcatcaccccagagatggaaggctacccgacagatgaaaatcaagccgctgcctatatgaacaagattatcgagaaagagatcatgcgcgcaccggagcagtacctctggatccaccgtcgctttaaaacgcgcccggtgggagaaagcagcttgtacatttaacaaactgctcttactctttccctcctcaaatcggccataataacctcatggtttttatggcttttttcttaaggttttttccttcgctgaatatctaattattaccgtcagaaattaaactgtcgccgatatgagacacttgtaagttactaaaagtaaataagaaaatgcctcttgtctcgtttcagttttaggcgtacattagcgccgtctcgagcagtttagctcagaattctggggtgatgcccacggtaaaatacagggcttttaaggtcgctttgcccggtgtcaactcactgtatcaggtgtaatgaagtcattcaggcgtaacagtaattacgcggagagatgtaaagtgaaatatttctttatgggcatttcttttatggtcatcgtttgggccggtacttttgccctgatgatctaaaagcaaactgtgcaatgaaaaacaggagccatcaggctcctgtttgcatttctgacgacggtgtttattccgcgttttcgtgaatatgtttgctgctggcgggtagtaaaccgtcggcacggaacatcgctttaatccctctgatggcctgacgaatacggtcgcggttttcaatcagtgcaaagcgaacatgcgtatcaccatagtcgccaaagccaatccccgggctgacacaaaccttcgcttcgttaaggagcttcttggcaaattccaggcttcccatggccgcatatggttccgggattttcgcccagacatacatgctagccttcggcatttcaaccatccagcccgcttcatgcagccctttaaccaatacatcacggcggcgtttgtactgttcggcaatgtcgcgcacgcactgttgatcgccctccagcgccgcaatcgccgccacctgcaacggcgtaaaggtgccgtaatcgtgatagcttttaatacgagccagggcgctgaccagcgttttgttgccaaccataaagccgatacgccagcccgccatgttgtagcttttgctcagcgtaaagaactcgactgccacatcgcgtgcacccggtacctgcataatactcggcgctttccagccatcgtagacgatatcggcataggccaggtcatggaccaccagcacatcgtagcgtttcgccagcgccactactttttcgaagaactccagttccacgcattgcgcggttgggttactcgggaagccgaggatcatcatcttcggtttcggataactttcacgaatggctcgctccagttcgttgaagaaatcgacaccttccaccagcggcacactgcgtacctgcgccccggcaatcaccgcgccataaatatggatcgggtaacttggattcggcaccagcaccgtgtcaccatgatccagcgtcgccagcatcagatgcgccaggccctctttgctaccaatagtgacgatggcttcactttccgggtcgatttcaacgtcgtagcgatcctgataccagcgggaaatggcgcgacgtaaccgcggaatgccgcgactagtggagtaaccatgcgtgtccgggcgctgggccacagtacataatttttcgacgatatgcggcggagtcgcaccgtccgggttacccatgctgaaatcgataatatcttcgccgcgccgacgcgcagccattttcagttcagcggtgatgttaaaaacgtagggcgggagacgatcaatgcgcgtaaagcgacgttcagggcgagtgtcagccataatttcctcagattaacgttagcgcccggaccgtccgagcgacgctgccacgatggtggctgttttgaaaatagcctgattaatttctgtctgtccagcgttttagaacattttattaatgacgttaaatgaggaactctgctttaaaaacaggaaatttatctgcgctaacaagaaaattaccactcattttattaacataataatttcaataaatttactaaccagaagtgcattatcaagagatgcattgctaatacaccatttatctatcaatccccttttaaaattgtggtttttcctcaaaaacggcctgctggtcatcagccttcaggttacctatcatagaggtttaatccttattcagagtcacccgtgcacgaaatattcaacatgctgctggcggtcttcgatcgggcagcgttaatgcttatctgcctgttctttctcatccgtatccgcctgtttcgcgaactgttgcacaagagcgcgcactccccaaaagaattgctcgccgttaccgccattttcagcctgttcgccctgttcagcacctggtccggcgttcccgtagaaggcagcctggtgaacgtacgtattatcgcggtgatgtccggcgggattctgtttggcccgtgggtaggcatcattaccggcgtgattgcgggtattcaccggtatttaattgatatcggcggcgtgacggcgatcccctgctttatcaccagcattctggcgggttgtataagcggctggatcaacctgaaaatccccaaagcacagcgctggcgcgtcggtattctcggcggcatgttgtgtgagacgttgaccatgattctggtaattgtctgggcaccaactaccgcgttggggatcgatatcgtctctaaaatcggcattccaatgatcctcggtagcgtctgtatcggctttattgtgcttctggtgcaaagcgttgagggcgaaaaagaggccagcgccgcgcggcaggccaagctggcgctggatatcgccaacaaaacgctaccgctgtttcgccatgtcaatagcgagagtttacgcaaggtctgcgaaattatccgcgatgacattcacgccgatgcggtggcgattactaataccgatcatgtgctggcctatgttggcgtgggtgaacataactatcagaatggcgatgacttcattagcccgactacccgtcaggcgatgaattacggaaaaatcatcattaaaaacaatgatgaagcccaccgcacaccagagattcattccatgctggtgatcccattgtgggagaaaggggtcgtgaccggaacgctgaaaatttactactgccacgcgcatcagatcaccagcagtttacaggaaatggcggtcggtctgagccaaatcatctccacgcaactggaggttagtcgcgccgagcagctacgtgaaatggcaaataaggcagagcttcgcgccctgcaaagcaaaattaatccccattttctgtttaacgctctgaacgctattagtagcagtatccgtctgaatccggataccgctcgccagttgatctttaatctgagccgttatctgcgctataacattgaattaaaagacgatgagcaaatcgatatcaaaaaagagctgtatcaaattaaagactatattgccattgagcaggcccgctttggtgacaagctgacggttatctatgatattgatgaagaggtgaattgctgcattcccagcctgctgatccagccgttggtggagaacgccattgtccacggtattcagccttgcaaaggtaaaggcgttgtcaccatcagcgttgcagagtgcggaaatcgggtacgcattgcggtgcgagataccgggcacggcatcgatccaaaggtgattgagcgggtcgaagcgaatgaaatgccgggcaataaaattggcctgctgaatgtccatcatcgcgtgaagttattgtatggcgaggggctgcatatccgccgcctggagccggggacggaaattgcgttttacattcctaaccaacgcaccccagtcgccagtcaggctacgttattgctttgagccggagtgatattgtgaaagtcatcattgttgaagacgaattcctggcacaacaggaactgagctggctaattaaagagcacagccagatggagattgtcggcacctttgacgacggtctggacgtgttgaagtttttgcagcataaccgcgtcgacgccatttttctggatatcaatattccgagcctggatggcgtgttgctggcgcaaaacatcagccagttcgcccataaaccgtttattgtgttcatcaccgcgtggaaagaacatgcggtagaagcgtttgaactggaggcgtttgactacattctcaaaccgtatcaggagagtcgtattaccgggatgctgcaaaaactggaagcggcctggcaacaacagcagaccagcagtacgcctgccgcgacggtaacgcgtgagaatgacaccattaatctggtgaaagatgagcgaataatcgtcacgccaattaacgatatctattacgccgaagcgcacgagaaaatgacctttgtctatacgcggcgtgaatcctacgtaatgccgatgaacattaccgaattttgcagcaaactgccgccgagccattttttccgctgccatcgcagtttttgtgtcaatctgaacaaaatacgcgaaatcgaaccgtggtttaataacacctacattctgcgactgaaagatctggattttgaagtgccggtcagccgcagcaaagtgaaagaatttcgccagttaatgcatctttaatcgggaactttcatgaaagcaccaggcttgcccgccgatcaacaatttttcgccgatctgttcagcggcctggtgcttaacccgcaactactggggcgcgtctggtttgccagccagcctgccagcttgccggtgggcagtttatgtattgattttccccgtctggatatcgtgctgcgcggcgaatacggcaatctgctggaagcaaagcagcaacgtttggtggaaggagaaatgctgtttattccggcgcgcgcggctaatttaccggtcaacaacaaaccggtgatgctgttaagcctggtgttcgctccgacctggcttgggttaagcttttacgatagccgcaccacgagcttgttgcatcctgctcgccagatccagcttcccagcctgcaacgcggtgaaggtgaagcgatgcttaccgccctcacccatcttagccgtagcccgctggagcaaaatatcattcagccgctggtgttaagtttgctgcatctttgccgtagcgtggtgaatatgccgccgggcaatagccagccgcgcggcgattttctctatcacagcatttgtaactgggttcaggataattatgcccagccgctcacccgcgagagcgtggcgcagttttttaatatcacgcccaatcatctgagtaaactgtttgctcagcatggaacgatgcgttttatcgagtatgtgcgttgggtgcgaatggcgaaggcgaggatgattttgcagaaatatcatctgagtattcatgaagtggcacagcgttgcggttttccggatagcgactatttttgtcgcgttttccggcgtcagtttggtctgacgccgggagagtacagcgcccgttttcagggctaacgtcagaaggttaattctgtttccagcagcgtcaggatactttgtgcatcttgcgcggcaaacaagctctggcggaagtttttattcaccagtttacgcgccagctggctgaagactttcacatgattcatcccttcgttagcacccagcgtcagcatgatcaccagttcgacttcgcccatttcactctgccagccaatcggtttcgccagccgggcaatgctgatactggaatgacggatccactgagatttggtgtgcgggatcgctacgccaaaaccaacgccggtggtaacaatctcttcccgctgccagacatcttcttccagctcaaacggatgttcagtgcgcccgttaacgccgaggttgccgcacaggaactggatcgcctgctctttattgctaaaatcctgatcaacaaagatattctccagcgccagcagtgggcgaacgtcttcttccggcgtaaaggcggtgagtaacgcttcaatttcctgcgcactgcggcattcacatgcctgacgcgccagttcccgacacgcctcgctatccagttgacgaagctggcttttcaccgccggaatacgcgggctactcatactcagctcatccaggcccagcccaagcagtagcggcagataacggctttcaccgcccagttcaccgcaaatgcctacccatttgccccgctgatgcgcagtggtaactatttgctgcaacatgcgcaggaagcttggcgtaatcgggttatatagcgggcttacgcgcgggttattacgatcgaccgcatacagatactgggtcatatcgttggagccgatactgaagaaatcgacctcatcgcagaagtggtcgatgatgtagcacacgctcggaacttccaccatgatcccaagcgtaatcgtctctgcatgacgcaggccatcgcgcttaagctcaacgatcgctttttggatctcgcctttcacccataagatctgatcgaggctgtgaaccatcgggatcatcaactgggcgttgccgaaactggcggcgcgcaaaatggcccgcagttgagtgcggaacaggccagcaaattccgggtaaatacgtaccgcgcgatagccgaggaacgggttctcttcctggggaatattcagataaggaatgcttttatcgccgccgatgtccatcgtgcggaagataatcggcttgtcgcccgccgccagtagcacctgctggtaggcttcaaattgctcctgctcgtccggcgcgctgtcgcgatccatatagagcatttcggtacggaacagcccgacaccttccgcgccgttggcaaacgcgcctggcgcttccagagcggtgccgatattcgccgcaatatcaatacgcttgttatcacgggaataggccagctgcgcggcagcctgcgcctgttgtttttggcgtttatccgccagcgtctgcgcgacctgataataaccgctcaccgcgtcattcgggttaatcgccagcacgccgcactgggcgtcaagcactgcaggttgcccggcataacgggcaatcgcatccagcggcaagccactcagtaccgggatcgcgctggcacgggccagaatcagtgtatggctggtgcgcccggttttctccagaatcatgcccgcaagatttttcaaatcaaggctcaaaaactggcttggggttaaatcttcagccaccagaatggtcggtttttcaagcaccagcttgttgcgcggcttcagttccggccaggtgatatgcagcaactgttcgctgatatcgcgaatgtcgctaacacgttcgcgcagataatcgctggcagaggcagaaagtttggcgcaaacctgctccatattgctgatgatcgccgcccccagcccctgatgctgttctgtcatcaggcgacggatattgcctgcaaattcatcatcctgaatcaggctcaaatgggcgctgaggatagttttgctttcgccgtcacgctcacgcaattgctggttcagttgctcggcaagcgttgccaggctgtgctccagccgggtggaatcttgcgcactggcggggattgcccgataactgtcgaggctgtcgctttgtaacagggtcagcgtacccacgccgacgccgcttgccagcacattgccgtacagtaaatccgggttaaggcggcttaaactacgcggcagcggatgcgccgtcagttctgcctgcgtaggctgaacgctgtcgctgtcgataaagcgcacctggatgtactcttccagcacgcgccgcgcctgctcttcatcgctgccgctaatgttcaggctgcaactgtcattaaatagggtgccggtgccaatcagcgccaggctgcttttcgcatctgcctttgcgttctggcgatggttaataaaagtgatttcgctttgccactggctgcactgttctttaagttcccacgccggacgagcatgtagaccgttaggcaaaggacagagaaattgaatcgttaacataaccgctccgggttaatcaggagatcatctgaaatccgtcagttgaacaaccgtctcacgcgtaagacgttgaataagggcagataaaagttgctgcatctgcaaaatgtcgcggcaatcggcaatgcttgcggcgcaatgtccatggcgggttgctggccccatcaccactgtgggcacgccggtgccggttaagtgcaccgccccgccgtccgtgccgccgttgctgaacatatctgcctgcaacggcacgccaatttctgccgccacggtttcgacccaggcggtaagttttggcggcgcaatcaggctcttgtcgcttaacaccagcatcggcccgttaccaatctggcgatggttagccgcgccataatcaaagtttttcgcccagcaggcggtatcaagcacaatggcgacgtccgggctcaccgcgcgggtggcagtttgcccgccgcgtaatcccacctcttcgctggaacttgccaccagccacacttccgcaggtagttcggcgtcgtgcagttcgcgcagtaacgtcaccagcagatagcaaccgaggcggtcatcaaaggctttccccatcactcgctggtgagggagaacctgaaaagtggtatcaaacgtgacgcgatcgccgggacgaattcccgcctgcatcacttcgtcataggagcgcgcaccaatgtccacgcgcatggcgctgacgtcattcccctgccggtcgccgtcaagcaggcctggaattttgcactcttcacgggtggtgatgcgcaccggctgcagctggcgggcagccatgcgtacgttgccaaccggcagcacatcaatcgccccttcgcgggagatgctgcgcaccataaatcccacttcgtccatatgcgcacagatcatcaccttcggacctgtgctttcattcaggcggatcagcacgcttcccagaccatcaaatcgcacttctttttgcaggcgatccgcttcttccagcaggatctgccgcacttcctgttcgctggaggcgatcgcatctgcctcgctcaacgcttttaataggcttaaatccattatgcctctcccgtgagcaacactgttttcggcatggcgtagagcacttctgcgccttgcggggtaaccagcacaacatcttcgatgcgcacgcccccttgccctggcaaataaatccccggctccacggtcagtaacatgcctggctgtagcgtcgtggtgtcccgcggactaaaacgcggatcttcatgaacttcaatgccgatagcgtgaccggtgttatgaccgaaatagtcgccataacctgcttctgtaatgacccggcgcgcggcatcgtcaacctgctggcagcgcacgccggggcgaatcgcggagattgctgcgagctgtgcctgcaggacaatttgatagacgttaaacagcaggtgagattcggcgctcaccccttcgccattcaccagcaaggtgcgcgtcatatcagagcagtagccctgatacagcgcaccgaaatcgagagtgacaaactcgcccgctgcaacaatcttgtcgctggctttgccgtgcggcagcgccccacgccagccactggcgacaatggtgtcaaaagaggctttttctgcgccctgctggcgcataaaccactccagttcagcggctatctcgcgctcgctcatccccgcctgaataaagcggcgaatatgctctgcaccgcgatcagcaatcccacaggcgaggcggattttctccacctcctctggcgttttgatttgccgcagcacatccggcgtggcgctaaccagtttcgcattgagttcagactgccagcggtgcgcggtttcccaactcacctgctggccctcaaaaccgagcgtttgcaactgttcatcggcaatgatttgattgacgatagtggtaagcgtgttcgtcgcgtcaagcaaatgcagctggtagccttgcgcacgggcttccacctcaacgtaatagcggctatccaccagaatgtgcgcactttcacggctaatcaccacataaccacttccggtggagatccccagatgcggctgtttgttctgccgactggagagaagcactgcatccagttgttgcgccttaagccagtcgcgcaggctagcgagtaatgtcatctggattttccttcttacaggctatcgattaacaatttgcctttacggaacatcatcagacgcaggaacaccaccatcagcgcagttatgactgcccccagcgcgatccccgccatatagacgcccaggttagtgaccagcggccatgcccagatagcggactccgggaaccattgcactgcgcccagccagacagcggcggtactgccgacaatagcgccgaccatatagctcggaatggcggtgatggggctttccagcgcaaacggaatcgcaccctcactgatccccataaacgccaggaacatggcggtcttaccctgcggataaagttgagcgttgaacaggcgtttgccggttaaacgacggtcgataatggtcgccagccccagaccaatcggcggaataacgatagcgatagaacgagcggtgaccggtaatacgtggtcagtggtaaagctgaaggcaacaaaacctgcggctttgttgatcgggccaccaaggtcgattgctgtcgccgcggcgatccccattgcgtacatcagcgcgcccttctcacctgcggcagtcagcacagtacggataccgccgttgatccagccaccaaagggggtgatgacgtagtacatcgccagcatgacaaaaatggcggaaagaatcgggagcaaaaatgtggttttgaacgctaacaggaaatccggtaactggattttctggttcatccacttcacaaggtaaccggcaacgatagaaataatcagcgcaccaatgaaggtggacggcaccgggctagaggtcgcccattgcatagtgctgggatcgaagttcagcagttgcgtcggctgggtagacatcaacccgccgataaaaccagccgggaacgccagtttgccaccgatagagttcgccacaaaagcagcaaacatcggaatggcaaaaccaaacaacacgccgccgaaggactggctcagccaggcaaatttaagtaaggagaggtcgaaaccggagaatttcccgctattaagagcatccatgatgccgatctcagcaggaattttaagccagctataagcaatcagctggctgaaagcgaggatcacaccgcccataattaaggtcggcaccatgcgactaatcccactcatcacatgctgcgggagttcaccccagaagctggttttagaggcctgcggattcttaactgccgctgccgcaccggatgcgccaggcacaacggttgcactgcgttttttaatggccataacaattatccctgtcgaatattactgttgttcagaggcaatcatctcttcgatttctttgatgatgcccgcagcgtttttaattgcgtcctgcaaagtgatttcataaacgtcgcgactttcgaaacgttcgttatcttccggggtaactgccacggagtggatgatgatggtcgcttcggcgatatcctgcgccgtcaggcgattctggataccgtccgcgccctgggtttcaattttcacttcataaccggcttctaccgccgcttcttccagcgcctgagcggccataaaggtgtgagccaggcccatcgggcaggcacataaggcaatcagtttcttactcatcgttaattcctcgttcagtgatagttgacgagtgaaattatgaacgtgcaaaacaaatcgccgttaccagacaaataatgcatttactggagaattaatcccgctgtacggaagtgtgacgcaggtcgaccttgtgaggggacacaaagaaaaattgaataaactgtatgatttaaaagattatcgggagagttacctcccgatataaaaggaaggatttacagaatgtgacctaaggtctggcgtaaatgtgcaccggaaccgagaaggcccggattgtcatggacgatgagatacaccggaatatcatggacatattctttaaagcgccctttatcttcaaatgcggcacggaaaccggaggctttgaagaactcaaggaagcgcggcacgataccgcccgcaataaacacgccgccaaatgtcccgagattgagcgccagattgccgccaaaacggcccataatgacgcaaaacaggctcaatgcgcggcggcaatcggtgcagctgtcagccagcgcgcgttcggtaatatcttttggcttgagattttctggcaggcggttgtcagctttcacaattgcgcgatacaaattcaccagcccagggccagaaagcacgcgctccgcgctaacatgaccaatttccgcacgcaatatttcgaggataatggcctcttcttcactattcggcgcaaaatcaacgtgaccgccttcgcctggcaagcttacccaacgcttatcgacatggaccagatgcgcaaccccaagccccgttccggcaccgtaaaccgcaataggcttaccttcgaccggttctgcgccaccaaactgaatcagatgctcttttttcagcatcgggatcgccatgcttacagcggtaaaatcgttaataatttccagatggctaaaaccgagattctttttcatttcggcaatactgaacgcccaggtatggttggtcatcgccacccagtcaccggtaattgggcaagcgatggcaatacagccgtctttcacctcgaccttatgttcttcaagataaacgcgaatgaccgcttcgaggctggggtaatcaagcccactataggtcttagcctggctgatttcaccactggcaatatcacacagagcaagacgtgcgttggtgccgcccacatcaccgactaatgcatactttgtcattcttcaactgctccgctaaagtcaaaataattctttctcacactgtaaatacctgggggcataacaacaacgccggaaaggcaggctccctgtaaatatcgatctgggtcacacaattactttatcgtttcagcaccaattgcagcgatgcctttttgcaagctgggcaaactaagtatctgaccccgcataaggaatagaacacaggcggcactaacccggacgtagactgtattacaaaagcggcaaaaagcagagacaaaaaacccccgctttgcagcgagggttggaaatttggtggagctaagcgggatcgaaccgctgacctcttgcatgccatgcaagcgctctcccagctgagctatagccccacgatgcgtttacgtaccaagtttgctgggtgcaaaatttggtggagctaagcgggatcgaaccgctgacctcttgcatgccatgcaagcgctctcccagctgagctatagccccgtcacgtaaagcttgtcgagttgacgggcggcatcatatgaattccgcccgaatgtgtcaacggcaaattgcaacgtgtagtttcaatcgctgaaaaatcaggcaaatgaacaattttggaaaaccgctcgcattcagtagttattcatgtcacggtttcctgtaaagtggtgttataaaatgaactactaatagacccacatacattcagggaattgttatgttcaaggagaggatgacaccagatgaacttgccagactgaccggctatagccgccagaccattaataaatgggtacgcaaggaaggctggacaacgagtccaaaacctggcgtccagggtggcaaagcccgactggttcacgtcaatgaacaggttcgtgaatatattcgcaatgctgaacgtccagaaggtcagggagaagcgcctgccctttctggtgatgcgccgcttgaagtattgctggtgacactggcgaaagagatgacgccagttgaacaaaaacagtttacatccttgcttctgcgggaagggattatcggattgttacaacgcttagggattcgcgatagcaaataatatgaaaagattacgcaataaaatgaccaccgaagaactggctgaatgcctcggtgtggctaaacaaactgttaaccgttggatcagagaaaaaggctggaaaacggaaaaatttcccggcgtgaaaggcggtcgtgccagacttattctggtcgatacgcaagtttgcgagtttattcagaacacgccagccttccataacacaccaatgttgatggaagctgaagagagaattgctgaatacgctcctggagcacgcgccccggcgtatcgacaaatcatcaacgcgatagataatatgacagacattgagcaggaaaaagtcgcgcaatttttgagtcgtgaaggaattcgcaatttcctcgcccgtctcgatattgacgaaagtgcataaataaaaaacggcaggatattatctcctgccgtttatctttttacacgctaattactgctgattttcgcgttcagcaataaaatccagcgctttgttgatacgctcgatactgcgggtcttaccaattgcgtgaacggtaacatccagtgctggagactgccccgcaccggttacggcgacacgcagcggcataccaactttacccatacccacttccagctcatccgccgtcgcctgaatagcgtgatgaacgttttcagcggtccagtcagtaatcgcggccagtttgtcacgaaccacttccagcggctgacgcgctaccggacgcagatgttttttcgcggcgtcggcatcgaactcagcaaaatcttcgtagaaataacggcagctctgtgccatctctttcagcgtcttgcagcgttcgcccagcagtttcaccagatcagccagctgcgggccgttacgggtatcgatattttcctgctcaatgtgccactgtaagtgagtagcaacatactccggcggcagcgcgttaatgtagtgatggttcagccacagcagcttgtcggtgttgaacgcactggcagatttgctgacggcattcaaagtgaagtatttgatcatctcttcacgagtgaagatttcctgatcgccgtgggaccagcccagacgcaccagatagttcagcagtgcttctggcaaataaccgtcatcacgatactgcattacgctgactgccccgtgacgtttggacagttttttaccgtcatcgccattgatcatagaaacgtgcgcgtaaaccggcaccggcgctttcagggccttaagaatgttgatctggcgtggcgtgttgttgatatggtcttcgccacggataacgtgggtgatttccatatcccagtcatcgacaaccacacagaagttataggttggggaaccatcggtacggcggataataagatcgtccagttcctggttgctgaactcgatcggaccacggatctgatcgtcaaaaacaacagaaccttcctgcgggttagcaaaacgtacaacacacggttcatcatcagcatgatgctcatggctgtggcggcagcgaccgtcataacgcggcttctcacctttcgccatttgctcttcgcgcagcgcttccaggcgctctttagagcaatagcatttataagcagtgccctcttccagcatctgatcgatcaccgcgttgtagcgatcaaaacgtttggtctggtagtacggaccttcatcccactccaggctcagccagttcatgccatccataatggcttcgatagcttccggcgtggaacgctcaagatcggtgtcttcaatacgcagcacgaactcaccgccgtggttacgtgcaaaaagccaggagtaaagagcagtacgcgcgccgccaacgtgcagatagcctgttgggcttggcgcgaagcgagttttgattttcatgaaatggccttacgtttagaaagatgccgacaaccggcaaatcctggaaaaattaagtgggcgatattctatcactcccgcctgattcctcaatgtagttcgggtttctaccttacgcattattgttttcgttgacaaattgcgcaacacggtctgttttgcgatcatcttgcttaaatttacgacgaacgaacaatttctttagaaaatgcgttgactcattttgaactctccctataatgcgactccacacagcgggggtgattagctcagctgggagagcacctcccttacaaggagggggtcggcggttcgatcccgtcatcacccaccaactactttatgtagtctccgccgtgtagcaagaaattgagaagtgggtgattagctcagctgggagagcacctcccttacaaggagggggtcggcggttcgatcccgtcatcacccaccactttctcgccagctaaatttcttgtaaaaatgtgaagtaccgaagtgggtgattagctcagctgggagagcacctcccttacaaggagggggtcggcggttcgatcccgtcatcacccaccacttcgggtcgttagctcagttggtagagcagttgacttttaatcaattggtcgcaggttcgaatcctgcacgacccaccaatgtaaaaaagcgccctaaaggcgcttttttactatctgcgatactcaaagattcgaacctgcagcaggtttgagttgagcgcagcgaaacaacggagccgctcgtgctggcgacggcccgaagggcgagcgaagcgagtcatcctgcacgacccaccaatgtaaaaaagcgccctaaaggcgcttttttgctatctgcgatttgcgaaattgcctgatgcgcttcacttagcagactactatttccggcaattcctgtctcctcacttactgtgtcaatgcagccaacagcttaaccatcgcgggcgtcacctgctgtgtttcataaacaatatataaatctgcagggatgcgctgtttgagcggacggaaaatgacacctggccagttcatttgtgcgtagctgtccgctatcaatgtgataccaatgcccatactgaccatagcgagtaccgtttgcggttcattaacttcgcgaataacaaccggactaaatcccacctgctggcaaactcgctgcaaaaaatcccagtcagtgtaaacgggcggcattgtaacaaaatactcgtcacgtagcgcttccagcgggacggtggaaaaactactgagatgatgctcttcaggcatcgccaccagaaacgcgctttcatgcaaccgtaagctggtaaaaccagtcggtggttctgtcgccattcgccagatcccggcatcaagttcgcggcgttccagcaaggccatttgcatcgcgggcatcttttcgcgaaaaagaacgtcaacgttaggattttccctgaggaatcgccgcataaccgggcgcatccgtccccacattgccgttcccactacgccgagttcaatccgccctgcttctccccgacctatttgttcaatccgagccaatacattattagcattcaccagcaatcgacggctttcttccatcaagattttgcccgcgtgtgtcagtacgacgctgcggctatggcgaataaaaagctgcgtgccgagttgattttccagctctttaatatgaatgctgagcggaggctgagacatatttaaacgcgctgctgcgcggccaaaatgcaactcttccgctacggcaagaaaataacggagcaacttaagatctgttctgtatacgcgttccataattaagtgctccatataataaatacatcgtattaaattatcatggcataaagtatttcaccaccagatatccgacatacataaacacaatggataatatacccggtaatacatttggtacaggaataggcaagcgcacgattgtaaacaaagcaccaataccaaaaccaacgccggaagaaaataaaatatctttcactaattaacctttatcataaaagcagctctgaagagcagagccgcgaatccttttaatgagtcaccgctcgatgctttatcttttcagggtcatgattatatttaaacccaaagaaaaatatcactgcgagaaaaagagcatatcctgcaaacaccagccagatagtttgccagtcttttacgccatccacgctaaagtaatctactgccatgccactcagaatgctgccaacccatgcgccgacaccatttaccatggtcataaagagcccctgcgcgctggcacgaatgctggaatcaacttcctgttcgacaaatacgctaccagaaatattgaagaaatcgaatgcacagccataaacaatcatgctcagcagcagcaaaataaatccggttgtactcggatcgccataggcgaagaagccaaagcgcagcgtccaggccaccatactcatcagcatgacggttttaatgccaaatcgctttaaaaagaatgggatagtcagtataaagcccacttctgccatctgactaacactcagtaaaatggagggatatttcaccacaaaactgtcagcaaactccgggttacgggcgaaatcatgtaggaacggattaccaaaaacgttggtaatttgcagtaccgcacccagcatcatggcaaagaggaaaaagatggccatgcgtggatttttaaacagcacgaaggcatccagacccagcttgctggcaaggcttgtggtcgcttttttctccgcaaccggaatcttcggcaaagtcagcgcataagcgctcagcagcaaactcgcaccggacgcgatatacagctgcagactactcaattccagatgcagcaggcttactgcccacatcgcgacaatgaaccccaccgtaccaaaaacgcgaatgggcgggaaagcggtcaccgggtcaagccctgcctgggcaagacaggaataagagacgctgttgcttaacgcaatagtcggcataaacgccatcgcattgactaacatcacccaaaacatcatatccggatcagttacggatgccgcataaaaaagtacgcccgcacacaccaggtgacacagcatgtatgcacgttctgcgcgcagccatttgtctgcgatgatccccattataccaggcataataatcgcggcgatccctttggaactgtaaaccatgccaacattagcgccggtgaaatgaagagtattaatcatgtaagagccgagggtaaccagccagctcccccagataaaatattgcaaaaaggacattacctttaagcgcatcgcgatgctcataatcgtttccttgtcgcatcatttggcctcacccgcgaggccgtttcttattgtttttctcaggcaattttgcgcagaaagccacaaataaggttgatgaagttctgcttagagagctccgcagccgccagcgtttgcgcatgactcaatttcacatcgcttaaaccttccgccatattggtaatcgcagagaccgcaacgactttaaggtcgcaatggcgagcactaataacctcaggcaccacagacataccaacaacatccccaccaataatttgcatcatgcgaatttccgccgcagtctcgaaattcggccccggatagctgacgaacacgccctccgtcagagggaaaccctcttctttcgccactttttgtaacagtgcgcggtattccgcatcgtaggcatttgccagactgaagaagcgctctccaaaacgatcatcgttaagacccaccatcggcgtaccgggcatggtgttgatatgatctttcaatgcgaccaggctgcctgcccccacttccggacgcaggctgcctgccgcattggtgcagaacagtagctcgcagcccagcagcttaaaggtacgaattgcgtcagtcataatggtcattccacgaccttcgtagaaatgtccgcgacctttcatacataccaccggtacgccctggagatggcccagcactaactcccccgcatgaccatgtaccgtacttaccgggaagcccggcagcttttcgtaggaaattgcgacagcgttctcaatctgatcggccagcgcgccgagcccggaacctaaaataaaggccactcgtggcgtgaaatcaggtttataagtcttgataatatctatgcaaaacagcgggttatgagaaaattgaacctgagacatacatatcctttttctgtagggtggaatctaacgcctttttatagcgaggttgtcccggctcttaccaatacacttttctcacgcattcaatagcgattcgatatcgatggatttatatcttttctctattaatccacggtaaaaactgtattggcgatattaattcctttgcattaacaatatgtcgtttttagcaaaccactttattaagcaatctactaataacgatcggcatagggaattatgctatgaaaaaacatcttttaactctgacactttcctctatattagcgatacctgttgtatctcatgcagaatttaaaggcggttttgcagatatcggcgtgcattatctggactggaccagccggactaccgaaaaaagcagcaccaaaagtcacaaagatgattttggttatcttgaatttgaaggtggcgctaactttagttggggagaaatgtacgggttcttcgactgggaaaacttctataacggtcgccataataaaccaggtagcgagcagcgttatacctttaaaaataccaaccgtatttacctgggtgacaccggatttaatctctacttgcatgcgtatggcacctacggttctgcgaatcgcgtgaatttccacgacgatatgttcctgtacggtatcggctacaatttcaccggcagcggttggtggttcaaaccgttctttgctaagcgttatacagatcaaacctattacactggcgacaacggctatgtcgccggctgggttgcaggttacaactttatgctgggcagcgagaaattcactcttaccaactggaacgagtacgagtttgaccgtgacgctacctatgcagcgggtaatggcggtaaagaagggctgaatggcgcagttgcactgtggtggaatgcaacaagtcacattactacggggattcagtatcgatatgcggatgacaaactgggcgaagatttttaccaggatgcgataatctactccatcaaatttaacttctgattgattactgccggggctcccggcagtatgaattcactttatatctgatacaacggatccccttcccgcccagccattagcgcattgccctggtctcgtaccacgtcccataaagcttcagcggcggtggaaagactacggttcttcctgcgcaccagcatcaactggcgttcaacaaccggcgtaatgcgctttaccaccagtgggctaccttcaggcaatggtagcgccagtgcgggaagaatactgatgccgatgcctgcggctaccatcgggaacagcgtcgccggatgtccaatctcctgcacaatattcgcctgaataccattgcgcgccagcgctgcgtcaatcagcggtcggctgccactcgcgtaatcctgcaacaccaatttcgctccctgtaatgcctgccagggtacataatcttccacggccaaagcgctatcgcgatggcaaagcagaaagaaaggctcggaaagaatcgcttcacattgcagatcgcccactgggcctggatcgatgacgatgccaaaatcgacatctccctggcgaatactttccattacccactgctgcggacgatcgtgcaggacaaactgaatatctggatagcggcgatggctttcagcaatgcattgcggaataagatgcgcggaaatggtctggctggcagcgacccgaacttttccgctcagttgttgccccatacgcccggtatcgcgcaacgtgctgttcagttcatccagcagtcgctcaagacgcaaagccagctgctgccctgcatctgtaagcaccacttcacgcgtggttctgtccagcaggcgaacaccagtatgattttccagttccttcacactgtgactcactgcgctctggctcaggccgatacgctctcctgcacgactaaaacttttctcctgcgctactgtgacgaaaacctttaattgttttaaagaataattcatctgttttcttcatgaatggatgcaataaatcaattttatttctcaaactggaagaagcacaatagaaccatcgatcatctggagtctttatgaaactttttcgtatcctcgatcctttcaccttaaccctgatcacggtggtgttgctggcctctttctttccggccagaggcgatttcgtccccttctttgaaaatctgaccaccgcagctattgccctgctgttctttatgcacggcgcgaagttgagccgtgaggcgattattgctggcggtggtcactggcgactgcatttgtgggtaatgtgcagcaccttcgtgctgtttccgattctgggtgtactgtttgcctggtggaaaccggtaaatgtcgacccgatgctctactccggttttctctacttgtgcattctcccggctaccgtgcagtctgcaatcgccttcacgagtatggcgggcggtaacgtcgcggcagcggtttgttctgcgagcgcatccagcctgctggggattttccttagtccattgctggttggtctggtgatgaatgttcacggtgcagggggcagccttgagcaggtcggtaaaattatgctgcaactgctgctgccgtttgtgttggggcatctttcccggccgtggattggtgactgggtgagccgcaataaaaaatggattgcgaaaactgaccagacgtccattctgttggtggtttatacagcgttcagcgaagccgtcgttaatggtatctggcataaagttggctggggaagtttgctgtttatcgtggtggtcagctgcgttcttctggctatcgtgattgtagttaacgtctttatggcacgccgactgagcttcaataaggcagatgaaattactatcgtcttttgtggtagcaaaaagagtctggcaaatggcatcccgatggcaaacattctgttccccacaagcgtgatcggtatgatggtgctgcccctgatgattttccatcagatccaattgatggtctgtgcggtgctggcgcgtcgatacaaacgccagaccgaacagttacaggcgcagcaggaaagcagcgccgataaagcttaaagcggacgcttcaggggctggaccagttgcgtcagcccctcggttttaatcagcagcgtgatttgcattagctcaccgagcttccctgccgggaactcatctttgcgggcaaaccacagcagatactcctccggcaggtcgattaagcgacgccctttgtatttgccaaacggcattatcgtattggctatttcaatcagctgctctttttccatctcagctacccagcaaacgcagcatttccgcttcgtcgatgacttcaatgcccagttcctgcgccttcgccagtttagatcctgcagcttcacccgctatcaccagatcggttttcttgctcacgctgcccgcgactttcgcgcccagttcgaccagtcgagctttagcgtcatcacggctcatctggcttaagctgcccgtaagcaccacggttttaccagcaaacgggctgtcaatctcttccgcgttgataacgatcggcgcaggccagtgaacaccttccgccaacagctcgctgatgacattgcggttgctttcttcggcaaagaagttgtgaacgtgggatgcaacgacaatgccaacatcaggcaccttttgcagctcttcaatgctagcggcttccagcgcttccagcgtgccgaaatatgccgccagacctgctgcggtggcctcgccgacttcacggatgccaagtgcatagaggaagcgagcaaaggtggtttctttcgctttttccagcgcgttaaccacgttttgtgcgctttttggccccatacgctccagtccggtcagtttgcctgcggtgagtttgaacagatctgccggagtatggacatattctttttcaaccagctgatcgatgattttgtcgcccattccgtcaacatccatcgcacggcgggaaacaaagtgtttcaggctctctttacgctgcgcaccgcaaatcaggccaccggtacagcgggcaaccgcttcaccttccacacgctcaacgtcagaaccacataccggacaatgcgtcgggaatacaacctcacgggtatcttccgggcgttcagaaagcacgacgttaaccacctgcgggatcacgtcgccagcgcggcgaatcaccactttatcgccaatgcgtaaaccaagacgttcgatttcatccgcattgtgtaaggttgcgttactcaccagcacgcctgcaacatggacaggttccagacgcgcaacaggcgtaatcgcgccagtacgcccaacctgaaactcgacgtcacgcacaaaggtcatctgctcctgcgccgggaatttaaacgctaccgcccagcgcggggcacgcgcgacaaagccaagctgctcctgctgtgccagactgttgaccttaatcaccacgccgtcgatatcaaagcccagcgtcgggcggtcttcttccactttgtgatagaacgccagcacttcttccgcgctttcacaaagcgttacccgatcgctgaccggcaacccccactttttaaattgcagtaaacggccaagatgagtatccggcagctcgccaccttccagaacaccaacgccatagcagaaaaaagtgagcggtcgcttcgctgtaatacgcggatcaagctgacgcagactaccagctgccgcattacgtgggttagcaaacactttcccgcccgtgcgtcgcgcatcttcgttaatcttttcgaaccccgcctgcggcaggaacacttcaccacgcacttccagacgcgccgggatattctctccgtgcagcttcagcggaatggcgcgaatagtacgcacattagacgtgatatcttccccggtggtgccatcgccacgggtcgcggcactgactaaaacgccattttcatacagaatactgacggcaagaccatccagcttcagctcacagcaccaggtgactttctcgttgtttttcagacggtcctgcacacgtttgttgaaagcaagaaagctttcttcatcaaaaacgttatccagactcagcattggtacttcatggcgtatctggctgaaagccgccagcggcgcagcgcctacacgttgagtagggctatcaggcgtaatcagttctggatgtttggtttccagctcgcgcagttcgcgcatcagcctgtcgtattcagcgtcgggaatttccggcgcatccatcacatgataaagatattcatgatggcgaagcgtcgttcgcagttctgtcagttgttgttcgatactttccatatcgcaccatcaatgctaaaaacccccgacaagcgggggttcgaagaggagttaatttgccttaagtgtatcaggcgttggcgtctttgacttcgcggatgatgtcctggtactcgcgcaatttctgcggagtcatcatacggcgctgatcgtcaagcacgacaccgcccacttcatcggcaatatgctgcgcagattgcagcatcagcttgaagttctgcagctcgtcaccgtaagacggtacctgcataaagatagtgacacccggagtagtgaaatccttcatttcaggatcaaaggttcccggtttcaccatattcgccaggctgaataacgccgggccgctgccatccgggctaagatgacgatggtaaatattcatatcgccaaaaatgaagcccgcttgttgaatgctgttaagaagcagttcaccgtttagctcgctaccgtgatgcgccgcgacgttcatgataatcaccgcttctttgcgcttcggtttatccataactggagcaggttccgctacaggctcaggctgtggtgccgctacgggttctgcaggctggaaagcctgttgtgccggttgcggtgcactatgcacaggctgcggcgctggcgcgacctgtgggctaactggctgctgcaacggctgttcaggctgcggctgataggcaggctgctgcaccggctgcgctggatgcggagcatgttgcggcggtacctgcgcttcaggcggctgctggaccggttgacgcggctgcgcagacgcataaggcggttggtactggtgttgcgggctcggacgagcagcctcatgctcctgagcgttagccggggcatgattcacgcggtgaacacgaacctcaccaacgccctcatcatcttcgacatcctcgtcataagaatcgtcgtcacgtttactcttcattcgttttaatggccgatcgcggaacatagaagatcgttctttacggctggtccagaaaccatgtaccagtaaagcgattatggcgatcgcgccaacaatgattaatatcagacgcaaatcctgcatcattatattctctgttgttctaacaccttgccaccacggcaaacatttactcactaagagtatttgccgattacctcaagtgcaagtgcactattaactttcacagcacaaagatagatgaaatcgtgctttttgctgttttttcgaacatatcctaactgtccattgcgcaattacccggtaaaatacgcagaattttcctgggattggtcaaaaggagctcatcctgattatggttagtagtttcacatctgccccacgcagcggtttttactattttgcgcaaggctggaagctcgtcagccaacctgggattcggcgtttcgttattttaccgctgctggtcaatattttgttgatggggggcgcattctggtggctctttacacagctcgatgtctggatcccgactctcatgagttacgttccggactggctacaatggctgagttatctgttgtggcctctggctgtcatctctgtgctgttagtgtttggctatttcttctccacgattgctaactggattgccgctccgtttaacggtttattggctgaacaactggaagcacgattgactggcgctacaccgccagataccgggattttcggtatcatgaaagatgtgccgcgaatcatgaaacgcgaatggcaaaaatttgcctggtatctgccgcgcgcaattgtattactaattctttacttcatccctggtattgggcaaaccgtcgcgccggtactgtggttcctgtttagcgcctggatgttagccatccagtattgcgattaccccttcgataaccacaaagtgccgtttaaagagatgcgcaccgccctgcgcacacgcaaaatcaccaatatgcagtttggtgctttaaccagcctgtttacgatgatcccgctgcttaatctgttcatcatgcccgttgccgtttgtggcgcgacggcgatgtgggtcgattgctatcgcgataaacacgcgatgtggcggtaacaatctaccggttattttgtaaaccgtttgtgtgaaacaggggtggcttatgccgccccttattccatcttgcatgtcattatttcccttctgtatatagatatgctaaatccttacttccgcatattctctgagcgggtatgctacctgttgtatcccaatttcatacagttaaggacaggccatgagtaagatttttgaagataacagcctgactatcggtcacacgccgctggttcgcctgaatcgcatcggtaacggacgcattctggcgaaggtggaatctcgtaaccccagcttcagcgttaagtgccgtatcggtgccaacatgatttgggatgccgaaaagcgcggcgtgctgaaaccaggcgttgaactggttgaaccgaccagcggtaataccgggattgcactggcctatgtagctgccgctcgcggttacaaactcaccctgaccatgccagaaaccatgagtattgaacgccgcaagctgctgaaagcgttaggtgcaaacctggtgctgacggaaggtgctaaaggcatgaaaggcgcaatccaaaaagcagaagaaattgtcgccagcaatccagagaaatacctgctgctgcaacaattcagcaatccggcaaaccctgaaattcacgaaaagaccaccggtccggagatatgggaagataccgacggtcaggttgatgtatttattgctggcgttgggactggcggtacgctgactggcgtcagccgctacattaaaggcaccaaaggcaagaccgatcttatctctgtcgccgttgagccaaccgattctccagttatcgcccaggcgctggcaggtgaagagattaaacctggcccgcataaaattcagggtattggcgctggttttatcccggctaacctcgatctcaagctggtcgataaagtcattggcatcaccaatgaagaagcgatttctaccgcgcgtcgtctgatggaagaagaaggtattcttgcaggtatctcttctggagcagctgttgccgcggcgttgaaactacaagaagatgaaagctttaccaacaagaatattgtggttattctaccaagtagcggtgagcgttatttaagcaccgcattgtttgccgatctcttcactgagaaagaattgcaacagtaatgccagcttgttaaaaatgcgtaaaaaagcacctttttaggtgcttttttgtggcctgcttcaaactttcgcccctcctggcattgattcagcctgtcggaactggtatttaaccagactaattattttgatgcgcgaaattaatcgttacaggaaaagccaaagctgaatcgattttatgatttggttcaattcttcctttagcggcataatgtttaatgacgtacgaaacgtcagcggtcaacacccgccagcaatggactgtattgcgctcttcgtgcgtcgcgtctgttaaaaactggcgctaacaatacaggctaaagtcgaaccgccaggctagactttagttccacaacactaaacctataagttggggaaatacaatgttccagcaagaagttaccattaccgctccgaacggtctgcacacccgccctgctgcccagtttgtaaaagaagctaagggcttcacttctgaaattactgtgacttccaacggcaaaagcgccagcgcgaaaagcctgtttaaactgcagactctgggcctgactcaaggtaccgttgtgactatctccgcagaaggcgaagacgagcagaaagcggttgaacatctggttaaactgatggcggaactcgagtaatttcccgggttcttttaaaaatcagtcacaagtaaggtagggttatgattagtggcattttagcatccccgggtatcgctttcggtaaagctctgcttctgaaagaagacgaaattgtcattgaccggaaaaaaatttctgccgaccaggttgatcaggaagttgaacgttttctgagcggtcgtgccaaggcaagtgcccagctggaaacgatcaaaacgaaagctggtgaaacgttcggtgaagaaaaagaagccatctttgaagggcatattatgctgctcgaagatgaggagctggagcaggaaatcatagccctgattaaagataagcacatgacagctgacgcagctgctcatgaagttatcgaaggtcaggcttctgccctggaagagctggatgatgaatacctgaaagaacgtgcggctgacgtacgtgatatcggtaagcgcctgctgcgcaacatcctgggcctgaagattatcgacctgagcgccattcaggatgaagtcattctggttgccgctgacctgacgccgtccgaaaccgcacagctgaacctgaagaaggtgctgggtttcatcaccgacgcgggtggccgtacttcccacacctctatcatggcgcgttctctggaactacctgctatcgtgggtaccggtagcgtcacctctcaggtgaaaaatgacgactatctgattctggatgccgtaaataatcaggtttacgtcaatccaaccaacgaagttattgataaaatgcgcgctgttcaggagcaagtggcttctgaaaaagcagagcttgctaaactgaaagatctgccagctattacgctggacggtcaccaggtagaagtatgcgctaacattggtacggttcgtgacgttgaaggtgcagagcgtaacggcgctgaaggcgttggtctgtatcgtactgagttcctgttcatggaccgcgacgcactgcccactgaagaagaacagtttgctgcttacaaagcagtggctgaagcgtgtggcagccaagcggttatcgttcgtaccatggacatcggcggcgacaaagagctgccatacatgaacttcccgaaagaagagaacccgttcctcggctggcgcgctatccgtatcgcgatggatcgtagagagatcctgcgcgatcagctccgcgctatcctgcgtgccagcgctttcggtaaattgcgcattatgttcccgatgatcatctctgttgaagaagtgcgtgcactgcgcaaagagatcgaaatctacaaacaggaactgcgcgacgaaggtaaagcgtttgacgagagtattgaaatcggcgtaatggtggaaacaccggctgccgcaacaattgcacgtcatttagccaaagaagttgatttctttagtatcggcaccaatgatttaacgcagtacactctggcagttgaccgtggtaatgatatgattagtcacctttaccagccaatgagtccgtccgtgctgaacttgatcaagcaagttattgatgcttctcatgctgaaggcaaatggactggcatgtgtggtgagcttgctggcgatgaacgtgctacacttctgttgctggggatgggtctggacgaattctctatgagcgccatttctatcccgcgcattaagaagattatccgtaacacgaacttcgaagatgcgaaggtgttagcagagcaggctcttgctcaaccgacaacggacgagttaatgacgctggttaacaagttcattgaagaaaaaacaatctgctaatccacgagatgcggcccaatttactgcttaggagaagatcatgggtttgttcgataaactgaaatctctggtttccgacgacaagaaggataccggaactattgagatcattgctccgctctctggcgagatcgtcaatatcgaagacgtgccggatgtcgtttttgcggaaaaaatcgttggtgatggtattgctatcaaaccaacgggtaacaaaatggtcgcgccagtagacggcaccattggtaaaatctttgaaaccaaccacgcattctctatcgaatctgatagcggcgttgaactgttcgtccacttcggtatcgacaccgttgaactgaaaggcgaaggcttcaagcgtattgctgaagaaggtcagcgcgtgaaagttggcgatactgtcattgaatttgatctgccgctgctggaagagaaagccaagtctaccctgactccggttgttatctccaacatggacgaaatcaaagaactgatcaaactgtccggtagcgtaaccgtgggtgaaaccccggttatccgcatcaagaagtaattcttgccgcagtgaaaaatggcgcccatcggcgccatttttttatgcttccgccagcggcggcaaaatcaattcatcgctctcatgctgctgggtgtagcgcatcacttccagtacgcgcaaccccgctcggtgcactgcatcggttaacgccttccctttcagcaagccactgatgagctgagcacaaaacaggtcgccagtccctttcaggtcggtttttacccgactatgggaaatgacattcacgctgtcggcagtgaccaccacaacctgcatctcctgattttcttcattaccggaggcgctggtaaccaccacccattttaatgtgtcactaagcagactttttgcggcagcaatggcactgtcgagatcgcggcaatttttaccggtcaggatttccaactcaaagatattgggggtaattccctgcgccagcggcagtaaatattgtcgatacgcttcgggaaggtcaggtttgacataaattccgctatcaatatcgccaatcaccggatcgaccatgatcaataggtcaggatggtctttgcgtagcgcagtcagccactcggcaaggattttgatttggcttgccgttcccatatagcccgtggttacagcacgaagttggcgcagcgcatcacgctcctgaagcgcacgcaaatagccgctaaaccattcgtccggaatcgcaccaccgtagaaagtgtcataatgcggcgtattgctcagcaataccgtcggcacggcaaagacattcaggccgttctgtttgatagcaggcacggcaatgctgttgcccacgctgccgtaaaccacctggctctgcacggcgacgatatccgcctgcagtgccctactcttatcgttaaacaacaacaaactactcatttaattttttctccttgccgatgatcctcatcgtaatccaaccgaaactttacctgattctggcagtcaaatcggctatcacaaaacaaggataaggtaattcaatgaagaaaatcatttgtctggtcattacactactaatgacactccccgtttacgcgaagttaactgcccatgaagaagcccgcatcaacgccatgctggagggattagcacagaaaaaggatttgatatttgtgcgcaacggtgatgaacatacctgctatgaagcggtttctcatctgcgtctgaagctcggcaatacccgtaaccgcattgacactgccgagcagtttattgataaggttgctagcagcagtagcattactgggaagccgtatattgtgaagatccccggtaagagcgatgagaacgcacagccttttttacatgcgttaattgcgcagacggataaaacggtgcctgcggaaggaaattaatccgctttgggaaggcatttacaggaggtaacatgaaaaaacgctttatttatcacgatgaaaaaagcaataaattttggtggatagattacgaaggggatagtttagctgtcaactatggcaaggtaggtagtattggtaaattccagacaaaagagttcgataatgaagaacagtgtctgaaagaagccagtaaattgattgccgcaaaaatgaagaaaggctatcaagaagatccaaagtttaacttcatggatcgctactattttgatgatgaagaaattgggttacatgttaaaacgagtcacccaaacttccagtgccattttactgatccactttatatgtgttgctgggatgaagaatctccttttggcagcgatgaaggtgctgatgctctaaacgttcttgaaaatagcctccgtaaagagccggatctggactgtgctgatttccctcaaatgttaattgaaactatgtggggtatgaaatacatcgctatggacagtattcttgaagaggatgttcgtgcgcaattactagtcgatgaaatgagcactatccagagcaatatgattacctacgcaactgcattcggtcagattaaagtcatgggtaaaatctcccataaacttaaaaagatgggactcaatgcactagcgcgtcatcagcttaccgcaaaaattcttcaatggggtgacggtcaggacagtccaatacttcaaaaaatgattgatgaccttacggcgtttcctcacgaaaattaaatactgcatttgtcggcagcaacaactgttaaaaaagtgcgctttgtttatgccggatgcggcgtaaacgccttatccggcctacaaaatcgtgctaattcaatatattgcagaaaccttgtaggcctgataagcgtagcgcatcaggcagttttgcgtttgtcatcagtctccgatgctattaatccttaaatccccgccccctggctaaaatgctcttccccaaacaccccggtagaaaggtagcgatcgccacgatcgcagatgatcgccaccaccaccgcgtcagggttagcttttgccacccgcagtgctccggcaaccgcgccgccggagctgacgccacagaatattccttcccgcaccgccagttcgcgcatggtgttttccgcatcgcgctgatgaatatccagcacctcatccaccagagaagcgttgaaaatccccggcagatattccgtaggccagcggcgaatgccgggaatgctgctgccctcttccggttgcaggccgacaatggtcaccggtttggattgttcgcgcataaagcgactgacgccggtgatagtgccggtcgtccccatgctggagacaaaatgagtgatgcgcccgccggtttgctgccagatttccggcccagtggtggtgtaatgcgcataagggttatcgggattattgaactgatcgagcagctttccttcgccacgattcgccatctccagcgccagatcgcgcgcaccttccatgccctgctctttggtgacaagaatcagttccgcaccataagcacgcatcgccgcacggcgttcctggctcatgttgtcgggcatcagcaatttcatgcgatagcctttcagcgcggcaatcattgccagcgcaatgccggtgttaccactggtggcttcgattaagacatcacccggtttaatttccccgcgcttttccgcctcgacgatcatgctaagtgccgcacgatctttcacgctacctgccgggttattgccttccagttttaaccacacttcactgccgttatccggccccattcgctgcaacttcaccagaggcgtattgcctattgtttgttctaatgtactcacgatctctatccatacgtggtgttgcctgatgcgacgcttgcgcgtcttatcaggtctacaggttacaaaccttgccattaaaaagcccggatcgcgggaagcgcctccgggcgtttaacattcactcaacctatcaggcgctttgtgcgagagcaagttcctcatcgcgggtttcgatacgctcgtcgccgttatacagccgcgcatgttgcagaccaacgaataaacgctcgccacgctgcggggcatcgtcgccatgcatcacgaccgtcagcggttcgttgtaccaccccagcggctgcaccactaattgggtgtagtgacctttcgggctggcttccagtacctgtaccggcagcgggctatcgaggctggtacggcggctgatatccacttcccaagggcgcaggaagagatccaccggcccctgatacgcaggtgtgtagcccagcggccagcgatgcgcgccaacatggaactgcccgccgcgaatggttccctgcaggcggttcacttcgcccataaattcgagcacaaaacgggtcgccggttcgcgccatacctgatccggcgcgtcagcctgttcaatattgccctggctcatcacaactacacgatcagctacttcggtcgcttcttcctgatcgtgggtcacaaaaacgctggtgaattttagttcttcatggagttgacgcagccagcgacgcagctctttacgcacctgcgcatccagcgcgccaaacggttcatcaagcagcagaatttgcggttccacagccagcgcgcgcgccagcgccacgcgctgtttctggccgccggaaagctgcgccggataacgatccgccagatgggcaagctggaccatttccagcaattttgtcactttcgctttgatggctgcggcattcgggcgctcgcgacgcggcagcaccgtcaggccaaaagcgatattgtcgaacaccgtcatatggcggaacagcgcgtaatgctggaacacgaaaccgactttacgatcacgtgcgtgcaggcggctcacgtcggtgccgtggaagcgaatatgcccgctggtttgatgctccagcccggcgataatgcgcagcagcgtggttttcccggaaccggacggccccagcaacgcgaccatctgaccactaggaatatccagactgatatcgttcagcacctgggtgcgaccaaagctcttcttaatattggcaatctcaatgctcatgatgttcctcctgctgtgcgcgtttttcctgattctccaggcgccactgcaacatactttttaaaaacagggtgataatcgccatcagcgttaacagcgccgcagcggtaaaggagccgacggtgttgtagtcctgctccagcaattcaatctgtaacggcaggctcagggtttcgccgcgaatgctgccggaaaccacgctcaccgcgccaaactcgccaattgcgcgggcgttggtcaacaccacgccataaagcagcgcccagcggatgttcggtaatgtgacgcgacggaacatctgccagccggacgcgccaagcaaaatcgccgcttcgtcttcctggctgccctggcttaacatcaccggcaccagttcgcgcaccacaaacggacacgtcacgaagatggtgaccagcaccattcccggccaggagaacataatttgcaggttatgctcgtcgagccaaccgccgagcgggccgttagagccgtagaacagcaaatacaccagaccggcaaccaccgggcttacggcaaacggaatgtccagtagcgtcagcagtaactggcgtccagggaagttaaagcgcgtcaccagccaggccagcagaatgccgaacaccaggtttaccggtacggcaatcagcgcgatcatcaccgtcagccagatggcgtgcagcatgtccggatcggccagattctgtaaaaccggcatcagccccttgctgaatgcctgcacgaagatgtaaatcatcggcaccagcaggatgaacgcgctaaccagcatcccgatgccaatcagaaaccatttgccccagttaatcgggcgcgcgtcataacgcttcaattgggtaacttccgccattaatgacctaccacacgccgaccaaagcgactttgcagagtgttaatactgaacagcagcagcagagatgccgcgaggatcacgctagcaatcgcgctcgctgccgggtaatcaaactcctgtaagcgcacaaaaatcatcaggctcgtcacttccgtcttccacgcgatatttccggcgataaaaatcaccgcgccaaattcaccaagactacgggtaaagctcagcgccacgcccgccaccagcgccggagaaagctccggcagcaccactttgcagaaactctgccagcgcgttgcaccaagcgtttccgccgcttcttcatattccgggcctaactcttccagcaccggctgcacggtacgcaccacaaacggaatgctggtaaaggccatagccaccgcaatccccagccatgtataggtgactttgatatcaaacttcgccagccattcaccgtaaaaaccgtttacggaaaagaggctggccagcgttaaaccggcgacagccgttggcagcgcaaagggtaaatccatcagcgcatcaagcagcgtgcggcctgggaagcgatagcgggttaggatccacgccatcagcagaccgaaaacgccgttaaaaatgcttgccacaaacgcgctcagcagcgttactttgtaggccgcgaccacctgcgggttggtgatcacctcccagtactgcgcccagctcatctgggccagttgcatcaccagcgcggagagcggcagcagcaaaatcaggcacacaaacagcagactggtgccgaggcttaaggtaaagcccggcagcacgcgtctggaggagacagcaaacatcagttacgccccgccgctaacagcttgtctaactcgccgccgctggtgaagtgggttttcatcacttccggccaggagccaaatttgtcttccacgcggaacagctcggtctgcgggaatttgtctttcagtttgtccatcacctccgggttattcacgcggtagtaatagtcggtgatgatggtttgcgcctgcgggctatagagccagttcagataggctttggcggctttttccgtaccgttggcctgcacgtttttatcaacccacgccaccgggaattccgccagaatgttggttttcggaatcaccacttcaaagccctgcgcttcatactgtttacggatgttgttcacttcgctttcgaagctaatcagcacatcgcccaggccgcgctcggcaaaagtggtggtcgcgccacgaccgccagtatcgaacacttcaacgtttttcaggaactgggtcataaactgttcggttttgcctttgtcaccaccgtcagctttatccgctgcgccccatgccgccagataggtataacgcgcgttaccgctcgttttcgggttcgggaaaatcagcttcacgtcggagcgcaccaggtcgttccaatcgtggatattcttcgggttacccttacgcaccaggaagcccatggtggagtagaacgggctgctattattcggcaggcggctctgccagtcggccgggatcagcttgcctttatcgtgcaggatttgtacgtcggtcacctggttataagtgacaacgtcggcttttaagccctgtaaaatcgccagcgcctgtttactactcccggcatgagattgttttatcgtcagtttgtcgccgccgttatcttttgcccattgttgctcaaacggcggattcagggcggcaaacagctcgcgggagacgtcataagaactgttcagcagttccgttgcctgtacatggcccgccagcagcagagaagcgaccagcgcgagactgttctttttcagtaagttaacggccattgcgcacccttataaatttaatgactttctaatagccatcatatttataacggacgtgaaaggagtaacggttttatataccgtttggtgatttggaagttgaaaagggaataagaacttggttcaacaggcgtaattgttgcagtcagtttggacacgaacagcgcggagaaaccggagcgtacacatagtacgtgaggatttcgagcactgcccggggccaaaatgacaaataaaatagcctggtgaacttagttcaagacgaaatcctccccacaaatgcagggaggaaacagaggtgaatcagataccgacgctaaccgtctccggcagtgtgctgccgccatcaatcacattctgtgtaccggttaaatagctggattcatcgcttgcgaggaaggccgccagttcgccgacttccagcggatcggcgaggcgacgcatcgggattgctttcgccatttcagtcagcacgctctctggatcttccgggttgctctggcgggcaatgctttccgccattggtgtgcgcacgtatcccgggcaaatggcgttaacgcgaataccagactgcgcgtactccaccgccaggctttttgtcaggccaacaatcgccgctttcgttaaggcgtacgccgtttcgccaggatcggccaccatatcaccagtgacactagacatcatcacaatgcgaccatctttgcgggcaatcatctccggcagcaccgccttcgtgacgttccatacgcctttaatattgatgtcaatatggaaatcgcgatcgtcatcgctcatatcgaggaaactgcccagacgacaaacgcctgcgttattcaccaggatatcaatgcgcccttctttttccttcgcgcgtttgatagctgcggctacgctcgccgggtcacgcacatcggcgacaaccgccgtacagcgatgaccacgaccacacagttcgtccgccagcttttcgatctcaggggagatatccagcaagattaggttcgcgccatgacgtgcaaaagttctggcaattccttcgccaattccctgcaatgcgcccgtaatcagtgctgtcttgcccgtgagtttacccattttaatgctctccttgttaatacagagcgttacactccattccctctgaaaatacaggataaacaaaatattgctgcggatcagctcactaattcaggaaaatctcaatccagtcgctgctttatgcatcatttcaggcgttgtgttagctcactgctgcgctgaatcattttcaaactctccacatcattgagttgcacaaggccaacaaacagtaaatcggtaacagaattttgcgccgtgcgggtagacatgctgctgctacgccattcggtttctccggaaacggtatcgagggtgaaatgcgccagccgccgcagcggagagtcagtcagagaagtaatggcaatcaccgttgccccctgctttcgtgccgcttctgcgcacaagacaatctcttttttactgccgctgtaagagatagcgatttgtacatcgccttttttcaacgcctgagaaacggtggcttgtacgtgcgtgtcggcttcgcaggccacgcgatagccaattttcatcagtttgaagctcagatcgcgccccaccagcgcgcttccgcccaggcccgttatctggataaacggtgctttactgatgacctcaatgattttttgcagccgcgcgtaatcgagcaacgcgcaggtttgctccagcgccagctctttttcgcgattcagtttgcgcgcgatcacttccaggctatcatcactggtaatgctactgtgcaggtgcagtgccgtggcattcgttttctcccggctggcactgtattcgcctattaacgccatacgcaattcagtaaatccttgcgcgccgagtttttgggcaaatttcactatgctgctctggctaatgccgagctgtttcgccatctgccgactagaaacggattgcagctcactcacgttggcctgcagaaagtcagcgattttttgctcgttttcggtgaattcactccccgcattgcttattttcgtcaggtacaacatcttccactctcctgggctggcagcataaattccgcttaagttcttatgacgctcttcacactctgcgagtgtagactcaatgattcctttaagcctgtcaattcgggatatatgattccatacatctgcaattatttgatcgtaaatagtaaggtcaccaccgatgcaatttgaaaagatgattactgaaggcagcaacaccgccagcgctgaaattgaccgcgtaagcacgctggaaatgtgccggattatcaacgatgaagataaaaccgtaccgcttgccgttgagcgcgtactgccggatatcgccgcggcgatcgatgttatccacgcccaggtaagcggcggcgggcgtctgatttacctcggtgcgggaacatccggtcgtctggggattctggatgccagcgaatgtccgcccacctacggcgtgaaaccgggtctggtggttggtttgattgctggcggcgaatatgccattcagcacgcggtggaaggcgcggaagatagccgggaaggcggtgttaatgatctgaaaaatattaatttaacggcacaggatgtggtggttggcattgctgccagcggtcgcacgccgtatgtgattgccggactggaatacgcacgccagctcggctgccgcacagtgggaatttcctgtaatccggggagcgccgttagtaccaccgctgagtttgccattacaccgattgtaggtgccgaagttgttaccggttctagccggatgaaagcaggtacagcgcagaaactggtgctcaatatgctttccaccgggctgatgattaaatccggcaaagtgttcggcaacctgatggtcgatgtggtcgccaccaacgaaaaactgcatgtgcgacaggtcaatattgttaaaaacgccaccggatgtagcgcagagcaagcggaagcggcgttaattgcttgcgagcgcaactgtaaaacggccattgtgatggtgctgaaaaatctcgatgccgcagaagctaaaaaacgcctggatcaacacggcggctttattcgtcaggttttagacaaggaataacccatggccaaagagatcagcagtgaacttctgaacaccattcttacccgtgtcggcggaccgggaaatatcgccagttgtggtaactgtatgacgcgcctgcgtctgggtgtacatgacagtagtctggttgatcccaatatcaaaacgctggaaggcgtgaagggcgtcattttgaccagcgaccaggtgcaggtcgtttttgggcctggtaaagcgcatcgtgccgcaaaagcgatgagcgagctgctgggagaagcaccggtacaggatgccgcagaaatcgccgcccagaacaaacgtcagttaaaagccaaacaaacctccggcgtgcaacaatttctcgccaaattcgccaccatcttcacgccgctgatccccggttttattgccgccggtctgctgctggggatagcgacgttaattgccacggtgatgcacgttccggcagatgctcagggaacactacccgatgcgctgaattttatgaaggtgttcagcaaaggtttgttcactttcctggtgattctggtgggctataacgccgcccaggcatttggcggcacgggcgtaaatggcgcaattatcgccgcgctctttttgctcggttataaccccgcagcgaccaccggttactacgccggttttcacgatttctttggtctgcccatcgatccgcgcggcaatattatcggcgtgctgattgccgcgtgggcctgcgcccgcattgaaggcatggtgcgccgctttatgccggacgatctcgacatgctgctgaccagcttaatcaccctgctgatcaccgctacgcttgcgtacctgatcattatgccgctgggtggctggttattcgaaggtatgagttggctgtttatgcacctgaacagtaatccgttcggttgtgcggttttagccgggctgttcctgatcgccgtggtatttggcgtgcatcagggctttattcctgtttacctcgcgttaatggacagccagggattcaacagcttatttcccatccttagtatggcaggcgcgggccaggtgggcgcggcgctggcactctactggcgggcgcaaccgcacagtgcgctacgcagtcaggtacgcggggcgattattcccggcctgctgggcgttggtgaaccgctgatttacggtgtcaccctgccccgcatgaagccgtttgttaccgcctgtttaggcggcgcggcgggcggtttgtttatcggcctgatagcctggtggggtctgccgatgggcttaaacagcgcctttgggccgtctggtctggtagcgctgccgctgatgacttccgcacaaggcatccttccggccatggcggtttatgctggcgggattctggtggcatgggtttgcgggtttattttcaccacgctctttggctgccgtaacgtcaatctggactgatatcatgaaacggacaatgctctatctttctctgctggctgttagttgtagcgtcagcgccgcaaaataccctgttctgacagaaagcagcccagagaaagcagggtttaacgtcgaacggcttaaccagatggatcgctggattagccagcaagttgatgtcggttatcccagcgtaaacctgctgatcattaaagataatcagattgtgtatcgcaaagcctggggagcggcgaaaaagtacgatggcagcgtgttgatggaacagcctgtcaaagccaccaccgggacgctgtatgacctggccagtaacaccaaaatgtacgccacgaacttcgccctgcaaaagctgatgagcgaaggcaaactgcatcctgacgatcggattgcgaaatatattccggggtttgccgatagtccaaatgacaccattaaaggcaaaaacaccctgcggatttctgacctgctgcatcacagcggcggtttcccggcagatccgcaatacccgaataaagcggtcgcgggcgcgttatattcccaggataaaggccagacgctggagatgatcaagcgcacgccgctggaatatcagcccggcagcaaacatatctacagcgatgtcgattatatgctgcttggatttatcgtcgagagcgttaccggtcagccgcttgaccgctatgttgaagagagcatttatcgcccgctcggcctgacacatacggtatttaacccgctgctgaaaggctttaaaccgcaacaaattgccgccacggaattgaacggcaatacccgcgatggcgtgatccatttcccgaatatccgcacctccactctctggggtcaggtgcacgatgaaaaagccttttatagcatgggcggcgtttccgggcacgcaggtttgttttccaataccggcgatattgcggtgttaatgcaaacgatgctgaacggcgggggctatggtgatgtgcagctgttcaatgcggaaacggtgaagatgttcaccaccagctctaaggaagatgccacttttggcctcggctggcgcgtgaatggtaatgccaccatgacgccgacgtttggcacgctggcaagcccgcaaacctacggtcacactggctggaccggaacggtgaccgttatcgatccggtgaatcatatgacgattgtgatgttaagcaacaagccacatagcccggttgccgatccgcaaaagaatcccaatatgttcgaaagcggtcagttgccgattgcaacttatggttgggtagttgatcaggtgtatgcggcgttaaagcagaagtaataaaaaggccagtcagtaatgttactggctggtctgagagtgctgacaaacgcaaaactgcctgatgcgctacgcttatcaggcctacgtggagcccacaatatattgaattagcacgatttcgtaggccggataaggcgttcacgccgcatccggcgtgtacaacgcgcacttggtcaacaatctgaggccagtcagtaatgttactgcctggcctttaatcaatgaatcagaaacgcttacagcgccatcaacttgtccaggctcggtgcgaaataatagccgccggttaccggtttggtgaaacgcaacatcgcatcacgcttaccatcggtatcgccaaacatgctcagcagttgctgctcaatgttatgcagacgcgcgcagtaggcgcagaagtacagaccgtgagtgccactggcagtgccgtacggcaggctctggcgaacaatcttcagccctttgccatcttctttcagatcaacgcgggtgaggtgagaggtttccggacgttcgtcgccgtcgatctcttcgttggcctctttggtgcgcccgatcaccatctcctgatcgtgaacgctcatccggttgagctgcttcaggttgtgttcccaacgctggacaaacacatagctgccgcccgcatccacgccgtctttgataaccgccacttcgcgacgcgtctcttcacccgccgggttttccgtaccgtcaacaaagccgctcaggtcacgctcttcaacccaacggaagccgtggatctcttctttcacttcaatgcagtcaccaaaggcttccatcgccgcctgggcgacagagaagtttacgtcgtgacgcagagaaagaatgtggatcaacacatcgaactgggtcgtcggcgcaaggcctttaccgtagcccggaaaatctttcagctcttctgccccaacgccgccgctcagagcgcgccaggtgttgttaccaaaggcaaccaccgcaccaagatgcgcgtccgggaatttcgcttcaaaagttgccagtttgtcggcaaatgttttactggccgcacgcagggcgtcaacttcccctttcacgttggcttcgatccaaatcgccgcgcggcaatgttctggcaaaatgccactctgaacctgagacattgttcctcctgaaaataataatgccacgcaatccgtggcattgttgagcgctattttacgtgttttttcgcggcggcggtttgttcagacgcaaattaacgccgccagataattttactgactttccagtttttcagggtatcgtcgctaggcattaacccttcaggaccacgccattccccgctgaactggtagctaatatgttgactgccttcggctttacattcgacggcacgattatcatcaccatcagctttttggcaattgccaaatgctttgctgtaaaggtcgctaaacggtgtaccgattttaacaccggtgtcagcaggaatatcgctatccagcacgtcaatgcgactgatcgtgccttgatcgccgttaatcaccatcgccacgttgtcgcccttcatcacttcaaaaaagcgcaccacgttgccgttcgcggttttcattccgctgcgcaggcgataatcgccatcaagcgcatcggcaatggcttgttcttgcagtggtgtggacgccgttaattcacccacgccctgctcgctcactttggtggagctcccaaaccagttccacgggttagcggcagaccagttaacactgctcatcgtggaacagccggtcagcatcaatggcatagcgcataacattaaacgcaggcttttcatgtcacttcctttggttattcaataacgttgcttggagtgcaaattcaccaaaaagtgccgttattcttttacttcataaaaacaagcgcgtaaacgtcgattggtcagcagccagattaacgccacaatatccgccactaccagcgccagaccgataccgctaacggattcaccgttcagccacagccacggttgccagcaaagtaaaaccacctgcgccaacagcaacagaaaatagagtacacgccaggtgcgaggaaacgtagcccgccgaccgctcaacaaaaacgccagcaccgccggaatgccaggaatcagccccagccagaaattatcgtgatcgggataaaacagatttagcagcgcagtaccctgctcgcggctcgcaccggcaatgacaaacagcacccaggttcgcgcctgaagcaatagcacaagccagaagagcaagggtaaacgcaggcgaccgtgcgcatcataatggacaggatgaaactcagtactcttcatcttcaatcaaacgcttacccagactcagcacgtcggcgtgttcatatcccaggcgttcatacattccgagcaccatgtcgttatcttccggcacattgatctgaattttcgggcagccacgagcaatcagctttttctccagccgattaagcaacgcattggcaatcccacgcccacgaaactctggatgcacgccaagataataagcagacccgcgatgcccgtcataaccgcccatcaccgttccgaccacgtcaccgtttacctcagcgaccaaaaacaaactgacgtcatggttcatcttacgctcgatgtccatttccggatcgttccacggacgcagcaagtcgcaacgctcccaaagggtgatgacctcttcgaaatcttcctggcgaaatacgcgtatctccatggtattcgttacctttttgcgggttaaaaggctgattatggcgtgaacggtcgaattagccaatatctgacgaaaatcggttgaaaaagtggcataatggggagttgtcaactattgaaatgaaaagtaaaacaattctcaacagcaaaccgtcgtaacggattacgcgatacgatataacatctggaactttattattacaactcaggccgtatgagcacttttaaaccactaaaaacactcactagccgccgccaggtgctgaaagccggtttggctgccctgacgttgagtggaatgagccaagccatcgccaaagacgaacttttaaaaaccagcaacggacacagcaagccgaaagccaaaaaatctggcggcaaacgtgtcgttgttctcgatccaggtcacggcggaattgataccggagcgatcggacgcaacggtagcaaagaaaaacatgtggtgctggcgattgctaaaaacgtccgttccattttgcgtaatcatgggattgatgcgcgtttaacgcgttctggcgatacgtttatcccactttacgatcgcgttgaaatcgcccataaacatggcgcagatctgtttatgagtattcatgccgatggctttaccaacccgaaagctgccggtgctagcgtatttgccctctctaaccgtggggcaagtagcgcaatggcgaaatacctgtctgaacgcgaaaaccgcgccgatgaagttgccggtaaaaaggcgactgacaaggatcacctattgcaacaagtgctgtttgatctggtgcaaacagataccattaaaaatagtctgacgctcggcagccatattctgaagaagattaagccggtgcataaactgcacagccgcaacaccgaacaagcggcatttgtggtgttgaaaagtccgagcgttcctagcgtgctggtggaaaccagctttatcaccaacccggaagaagaacggctgttaggcacggcggcgtttcgtcagaaaatcgccacagcgattgctgaaggcgtgatcagttatttccactggttcgacaaccagaaagcacatagcaaaaagcgataagttatgaaacccgacgcacaccaggttaaacagtttctgctcaaccttcaggatacgatttgtcagcagctgaccgccgtcgatggcgcagaatttgtcgaagatagttggcagcgcgaagctggcggcggcgggcgtagtcgggtgttgcgtaatggtggtgttttcgaacaggcaggcgtcaactttagccatgtccacggtgaggcgatgcctgcttccgccaccgctcatcgcccggaacttgccgggcgcagtttcgaggcgatgggcgttagtctggtagtgcatccgcataacccgtatgttcccaccagccacgcgaatgtgcggttttttattgccgaaaaaccgggtgccgatcccgtctggtggtttggcggtggcttcgacttaaccccattctatggttttgaagaagatgctattcactggcatcgcaccgcccgtgacctgtgcctgccatttggcgaagacgtttatccccgttacaaaaagtggtgcgacgaatacttctacctcaaacatcgcaacgaacagcgcggtattggcgggctgttctttgatgacctgaacacgccagatttcgaccgctgttttgcctttatgcaggcggtaggcaaaggctacaccgacgcttatttaccaattgtcgagcgacggaaagcgatggcctacggcgagcgcgagcgcaatttccagttatatcgtcgcggtcgttatgtcgagttcaatctggtctgggatcgcggcacgctgtttggcctgcaaactggcgggcgcaccgagtctatcctgatgagtatgccgccactggtacgctgggaatatgattatcagccaaaagatggcagcccagaagcggcgttaagtgagtttattaaggtcagggattgggtgtaactccctcacccccactcccgcatccgctgatgcagcgtcagactcggcttctcggaaaacagctgctggtaatccgtggcaaattgccccagatgccagaatccccactgcatggcggcgtcttttaccgtcatactttggctccacggacttatcagttcgcggcgtacggcgttcaggcgaatgcgtttcagccacgcgttcgggccaatgcctaaaatagcgtgaaacgcgttttgtagcgtgcggcggctgacatgcagttgattacacaaatccagcaccgtcaccggttcggacatgttttccagcacatattcacgggcgcgggaaagcaatcgacggtaactctgatgactgatgctttccgccgtcaccattggttgcgcttcttccagcatggcccccatcgccattagcaaattatcccccagcacttttcgcactgcaggctgatggagattttccggattctcgcaaaacgtcgccagcgcctgttggacaaagccccacagcgcggctttatgctgctctttcacttccagcgcgctctggttacgcaacatatgtaatacccgatccgggttatgcaaaaagttagcctgccgggtgatgacatcttcagaaagcaccacgcccaggatcgtgtaatcatccggcgtgctcagttcaaattcagtgccaccagggcgggtggcgatttccgcgcttcccagacattggctaccgataaatccctgctcaccgcgcgtcgccggaatgccaaaccagaagctgttcggccagaccaggcagctctgacgcagcgccagaccggtgtattcacgaaaaacctgaatatcatcgagtagaatttccgtaaattcaccatgaaacttgcccggatgcagctgatcgtaaatctgctgccaggcggtaatcgttaaagcatgttcatagacatccgttgtctgtcgttgatgaacattatccacttcgaccttcggcgtgagcttcaggttttcgggtaagggttcatgataaagatggtgcaaattggctgtacgggtctttttcatgatgttaatgccgggtgttgtaggacacccggcacctccgacaggttaatggggcttgagacgataacgactactgcgtttacgtaacgtcccggcagaaaagagctgttcgagcgcatttctggctttttccagcggccagccaaagtgggcagccacttctcctgccgtcattccctgacgtacacttgttaacagcgccaacaactcgtcagcagattccgcgacgataactggcgcgtcgggttcccttacgggttgcttcggctggcggttaaagccagtaaccagccactgggtgtcatcgtctggccgaccgatctccttgcggctgatgacacgcccggtacgcatcgcggcagcacaacctgcgtccagcgccgcacgacacgccgccagatcgccttccaccaccagcgttaagcgaccagggtcaagcacttcgtgactgagcagacgaacgttagctgctttgagcatggcatccgctgcatctatcgcggcgaccatgccgtccacttccagcaatcccagtgcattgatcatcggcaacctccgttacgcacgctggattggattacgcgcgatttccagcactgcatcggtaaaggcgttacaggctgctttacacgctgcctggctaccggttaaaaatgctgcgctgtagttggtttcagacggtggcgggacataggtcgccagctgtacgtcggcagacttcagggctgcatcaatgccataggtcgcttccagcggcggtgccaccagatacgccatcggatcgccaagcgtgatcccggcggtactactgagataagaaccggtacggctaactacatgtgccaggaatgccgtatcttgcgcgtcattagcccactggaaagctgcgccattttcaatatgcgcaatcatcgcatccagacctgcacgcacttccgccgggtttggcccaccaagcataatcagcacttcaccggcagtcggactcgggccgtgtgcagcgcccgcatataggctgcggccatacaccacttccaccatcgcctgcttggtcgcttcatcagcggcaatgtaggtgacgtcatcggagtcggcagaaatcagaccgaggctacgaatatgcggcggcaatttcagttcacgcgcaaaatcggcgttaacggaggcaatcacccgcatagcggtgacagacggtcgaatcaaatctaaagctggcatgatgcctccttatcgggtcatgttgatgccggatgctttctgctccagcatacgtttcgccaaatccacaatgacggctgcggcttcaaccggcggcgtgccgccctggtgaatgttagagatacaggtgcgatcggcctcaacggtggtcgccatacgcgggctgtaaacggcgtagcaggagaggctttcactctgacccaaccccggacgttcgcccaccagcaggatcactactttcgcgccgaggatctcaccgatctgatcttcaatcttcacgcgaccataacgaacaaagaatggtgtaccgactttcagcccggcctgtttcaggcccgccatcagcggtggcaggatctcttcgtagttcacggtgatcgcatcagtactcaggccatcagaaataacgacctgtacgtccggattggcaacacactgcgctttcagcgcttcaacagcttctgcacacaggcggcggcccatatccgggcgagtcaggtagagatttttgtcgctaatttcagagcgtacttccagcaagccctgcgctttcacccactcttccggcacttctttcagtacggtatctttgctacgagagtgatcggccaggaaacgcagcagcgcctgcgtacgtggacgcggaccggcacgaccggtacaaacgcgggccacggtgctgcggcgcagttctgttaatacgtctgcgcgatgcggattttcaacaccaatccacgcttttgcttcagcggaacctaaatccagcgcacagctttcgctggtcaccggtgccgcacagttggtggtggcgcactttgcttcactcggcgcgggggccgcttgtcccatactcgccatcacgctgcgtacaatttcttcaatctgtttttgatccatgatatgttatctccgcgtcatcagaagaacagactcggatcgcccgcccgtttggtcaggcgaccgtttgccataatgcccatgctttccagccagcgttcaaactccggactcgggcgcaggttgagtaactgacgcacagtggcggtatcgtggaatgcggtggtctggtagttgagcatgatgtcatcacccagcggcatccccatgatgtagttgcagcctgcggtggcgagcaggatcatcaggttttcgttgaggttctggtcagcgtcagcgtggttggtataacagcagtcacagcccatagagatgccgctcagcttgcccataaagtgatcttctaagccagcacggataatctggcggtcgttgtagagatactccggcccaataaagccgaccacggtgttgacgataaacggatcgtaatgacgcgccagcccgtagttacgtgcttccatcgttacctggtctgcgccgaagttagcgccagcggatagcgcagagccttgtccggtttcgaagtagaggcagttttccccggcgatacggttgaactccgcgcccactgcgcgcgcttcgtcgagcatcgccagctccacgccaaactctttcagccctttttcgctgccacagatactctggaaaatcagcccgcccggtgcgccacgacggatcgcttcgatctgggtggtgacgtgcgccagtacacagccctgagttgggatgttgaatttgtcgatcacgccatagatggtatccaacacgcggcttaagttttccacgtcgtcagtcaccgggttaacgccgatcaccgcatcgcccaccccgaaggaaagcccttcgtagatttgcgcggcgatactttgcacgtcgtcacgggtgtcatttggctgcaaacgggcgctaaaggtgcccggaataccgatggtggtattggcctttttgattaccggcattttcttcgcgccgtagatcaggtccgcgttggagcaaatcttcgctaccgccgcgaccacttcgctggtcagccctttgcgggtaaaggcaatgtcgtccacgctggtttcatcgctcagcacatactcacgcagttcgctgatgctccagtttttaatctggttgtaggccgtttcgttaacatcgtcctgaatcagccgcgtcacgcagtcatcttcataggcaatcaccggattattgcggatgtccgctacggtcatttcgctcaacacctgctttgccgccacgcgctcctgactgcttgccgctgcgacgcccgccagcacatccccgctacgcagttcgttggctttagccagcacctcttttacatccttaaactgatatacattgccgaacaatgtggtctttagtttcataagtcgttccctcaggaaggaaatgcgagacttttcaccgtcaccggcacaacgcttccgccaaaaagaggcgtaccaatgtcgatatagtcccccgcgcggacaatcacttcgtcaatgactgccaacgggagttgttgtagctgtgggcgcaacaacatgcccagagctttaccaaagtcctgcccggccaccaccagcaggggatgcggattcggaaaacgcgcgacgaaatcgaccaacgcgttgatgaccgtcagtaccgcggcgtaacgcacaggcaggctggcgggaagcgccagcacgtacgcgtcagttttgggatcaagatccagctgaatcagcgcctgttgccaggcccccaccagatccgtttcatcaatcgggatcgccaccggcaaattgcgcagcggcagttgtacgccctcaagccagattgtgctgccagagaggctaagggtatgcgcgcccgcgccaatcaccgtggcgcgcacggtttgcgccggaaactgtacgttcatctcacgcaggcgcggatggtcatgcagcgcagttgccagcagcgggccaatatcggcaaaacagaacgggtcggcgggctggtggcgataacattcgcccacgccgccagaaagcgtaatgatttcgggcgtaacacctgcgggcagcaaaccggtttgcatcaatgcctgcgcgagcggactgagcgttccgtcaatcacttcgacaatcagttctgccatccgccgggtcacctgcaccagctgcgcgccggtcaggctacgggcgtcggtgcctgcaccgaagcactcatccacaatcatctgccccggtttatgagcgtaaaccacgcgcccgtggctgtcggtttccagcaggcgaccaccgacgttgaggcaggcagtgccgctgatttttccggcatcgaacagggcgtagttcgcggtgccaccgccgatgtcgatattcagtacccgacacagccgttgttcagaaagggtttgtgccccggctccgtgaccggcgatcacggattcgaggtgcggcccggcgctggcaacgacaaaatcgcccaggctctgagagagcgccatcaccgccgggcgagcattgcgggttttcgcgctttcaccggtgatgatgatggcaccagaatcaacgctttccggctcaatacccgcagcatgatattgctcgagtattaaggttttcagttccgcttcttttaaaccgccctgtttatcgacaggggtaaagaacaccggactttgccagctaatttcgcgtttaatgaattcgtagcgcggcacctggctcaccgccgcacggttaaccagctccagccgggagaaaatcacctgggtggtggtggtgccgatatcgataccgacgctcaatagctggcgagtgttcacgattgtgcctccgcttcggtttaagtcagctttgtgcctccgcttcggttttagtcgcggtcgcgtcttcttttggcaccagcatcatcgccacgccaatcgccgttacgccgccgatcaacttgccgacaatcatcgggaagatcatggcgttcatgttggcagcggcgaagcctaagtggtcgcccagggcgaaagcagcggaaacggcgaaggcgcagttgatgactttgccgcgggtatccatctgcttcatcatgccgaacatcgggatgttgttggcaagcgttgccaccatgccggctgccgcgatgttgttcatattcagtactttaccgacgctcatcagcggtttttcaaaccagcgagtcagcagcagcaccatcggatacgcccctaacagaacgcaggagatagaaccgataacttcaatggcgcgcatcacctcaccgggtttatcgccaggggccataaagataggatccagaccggggatcagttcccagccaagcaggaatttcactaccgcagcggcaagaccgagggtgatcaatgcaacgaggaatttggcgaagatctggaagccgttgatcattttttccgggatgaatttcagccccagcgccaccagaatcgcaacaatgatcaccgggatcatgttcatcaggatcagggcgaaagtgaattccaccggctggccgttgatctgcacaccggagtacatagcaaccagaccaccagcgatacaaccaatcggaatggtcacaatgcccgccagcacgccgagcgccagataacgacggtcagaaggttcgataatgccgagcgccaccggaatggaaaacacaatcgttggccccatcatgctcccgagaattaacccagagtatagccacgcggctacgtcgccgcccgccagctctttggcgaggaagaagccgcccatatcgcacgccagcagtgttccggcgaacatgcttgggttagcgccgagcatttcgtaaaccggaataattaccggcccgagaacgtgagccagtaccggtgccagcgcggtcataccgaccatcgccaggcccagtgcgcccattgccataaagccttcttcgaactgaccgccacttccttcgatacttttaccgaacttaccgaggaaacgagcagaaccgccgaactggctcaggatcctgtctacggcagctatcagcataaagaacatcatgatgtacatgatgatttcgttaattcccatcgcctttactccctgttagttgttatttattggcggatgcggcgtaaacgccttatccgccctacatgtgcaatcccgtaggctggataagacgcggcaagcgtcgcatccggcaattgcaccgcgccactggcggatgcggcgtgaacgccttatccgccctacatgtgcaatcccgtaggctggataagatgcggcaagcgtcgcatccggcatttattgcgccgctgcgtacaggccgacaatctgctccaggctggcggtacgcgggttactgcgcagacaaatatcttccagcgcggcctgcgcccatgcgccgtaatgcgcagatgtcgcaccaacatcgcccagtcgtttaccaatcccaacttccgcaatcagctcacttaccgcgttaatagcgtcacgatcgtcggattttttagttcgcagtgcccgaccaatctgactaaagcgttcacgacaaaccatccggttaaattccatcaccgttggcagcaacatggcgttcgcgagaccgtgcggaatatgcagcgccgcgcccggctgatgcgccatcgcgtggcacaacccaagacccgcactggaaaacgccattcccgccatacaactagccagcaacatgctctcgcgcgcggcaaggtcgtgaccgtagcccaccgctttcggcaggcttttgccaatcatcgcaatggcaccaatcgccagactgtcggtaaacggtgtagcgttcagggcgctgtatgcttcaatggcatgggttaacgcatcaatgccggtcatcgccgtgacatggctcggcacaccttcggtcaatgcggcgtcgaggatcgccacatccggcatcaggctggcatgggctaacacctgcttgcgcccgctcaccgcgtcgataatcaccgttacattggtggtttcagagccggttccggcggtagttggaatggcaatcagcggcaagcgcggttgcagaacgctggtttcactcatctctgccagcgtgctatccgggttcgtcaccagcaacgtcacggctttcgccgcatccagcacgctgccgccgccaaacgcgatcaccccatcacagccactctcacgcaactgcgccacggctgcacacacgtcggtaatgcacggttcgcccaccggacatggccagagcgtcatggcgatacctttaacggtcaggctacgcgtcagcccggcggtcatccctgcctgatgcaaaaagctgtctgccatcacgaacagatgtttcagcccacgcgtttgcgcttgctgtccgcaactgctcacgctgcccggaccgcaaagcgtcaccggtggaacgctaaatgtttttacccgttgcagattcagggtatcgaacgcctgaaagagcgcggtctgcaattcattttgcatatagcccctccgctttctctcgcccactactggcgatcgccagcggggtcataaacaaactgtgctgcggtaaatgcacctgtaacgccgggaattgtttgcgaaacagttccgccacgcccggttgcatacaagagccgcccgccagccataaatcagtaatgccctgcccttcaatatgccgggcgacaatgtccgccattttttcgtacaccggtttcaccgcaggccaaatctcttcaccgtgaccgcgcttgtactgctccgcctcttccaggctaatacggcgatttccggcgagagtcagagagatgtgatgtccgccggtggcttcatccgcgctgtacgtcaccttgccctttttcacgatggcaatgccggtagtgccgccgccgatatccactacaccggcgttgtccagttgcagcagatccgcaactgcggttggctcatccagcacatggctcacttccagtccggcagattccagcacgttgatggaaatacgcgggtccgtacctggaggaaaactagtcgccgcatggctaaaacgacgaccgaattgctgctcgagcgtgtcgagatggcgacgaacaatggtgacagcgccgaagaaatcccagacgatgccgtcgcgaaccacatcggcccagtcgaggcataccgccactggctgaccgtcgcggtcgacaaccatgctcaccacatcgcaggtgcccagatccacccccagccacagcggagattccgtcgcggcgggcgtctggttacacagcgttgccgccgtttgcagacgtggggtgagccattgttcgtcgtgcgccatctgttactccttaaacaatgcgaaacgcatcgactaatacacagcgacgcagacggacaaacgtacgcgcgctggttaccccttcaccggttggcgtggtgatggtcatggtggtccagccttccccgcccagccccagcccggcaatgcacggtccgttcttaacgaaaatgctggtatcaatagcattcgccatctggttcatgttttcgatgttgcggctgtgcattgccgccgtgtggtggcaaccgccttccagtttcaccgctagcgcaatggcatccgccacgttggcgacgcgcacgacgggcaacaccggcatcatcagttcagtcacggcaaacggatgttctgcggtggtttccacaaacagcaggcgcgtttcttgcggaactttaaggccgattgccgccgcgattttgcctgcgtcgcgaccaacccagtcacggctgacggtgccttttccgcgctcgtcgatatttttcagcaacaccggttgcagctgctgcgcctgttctgcggtcagtttcaccgcgtgctggccttccatcagacgcatcagttcatcggctacgctatcaacaacaatcagtaccttttcgtcggcacaaatgatgttgttatcgaaagaagcgcctttgacgatggactgagcggcacgggcgaggtcggcggtttcatccaccactaccggcgggttgccagcgcctgcggcaatcagacgtttattggtgtgtttacgcgccgcttctactaccgcttcgccgccggttaccaccagcaggccgatacccggaaacttgaacaagcgttgcgcggtttcgatatccggatttgccacagtaaccagtaagttttccggcccacctgcggcaacaatcgcctggttgagcagcgtaatcgcccgctgggagacttttttcgccgccggatgcggggcaaaaatgacgctgttgcccgcggcaatcaggctgatggcgttgttaattacggttgccgccgggttagtggaaggcgtcacgctagccaccacgccccagggtgcgttttcaattagggtcaggccgttgtcgccagtcagcacttgcggagagaggcactcaacgcctggtgtgccgcgcgcctgagcgacgttttttgcaaatttatcttcaacgcgccccatgccggtttcactgacggcaagttccgctaaatctctggcgtgtttttcgcctgcttcacgaatggcagcaatggctaactggcgcattgccacgctttttaacccttgctgggcgactttggctgccgcaacggcgtcatccagggacgcgaaaacgcccatctcatgaacggcggcggacggcgtgtcactgctttgcattttcagcagtaccgctttcaccacctgttcaatatcctgttgattcatgatgttctgccttatttgtggaaaattacctgaccgccagacaccacctcatcgacaatgccaatcacgcacagatcgaccggactcgtttcgcttttatgcgcctggcgggcggaactgccactcaccagtaacacccactccccggttcccgcgccaatattgtcgatggcgacggcgcattgcccgtcaggattaccttgtggatcaatcatttccaccatcagcaatttgtcatgcgccagtccgtgatggcgtacggtacaaacaatttgtccagtgacgactgccagtttcatacccgcctccgtggcgtatttcaggtaaaagctccccctaccctccgcagaaggtaaaatgaaaaaggagagagcgtgacgcccgaatcgacgtcacacagggtgattacaggttgctgctatcgcctttcaggccgatcgggaagacttcttccaggtcgccgtgcggacgcgggataacgtgtacagataccagctcgccgatacgctgtgccgctgcggcacctgcatcggtcgcggctttacaggctgcaacatcaccacgaaccatggcagtacacaggccgccgccaatctgcttaacaccaaccagcttgacgcgcgcagctttcaccatcgcgtcagaagcctcaatcagtgcaaccaggccccgggtttcgatcattcctaatgcttccattgtgctttcctctttatcagggtccagaacgggaccgttcattcaaccagtgtttgtaaactgctttcgcggttcacttctgtctgacgcggcacagctgccaccagcgccagctcgataatttcctgcacgctacaaccacgagagagatcgtgcatcggcgcggcaagtccttgtatcagtggcccgacggcacgatatccgccgagtcgttgtgcgattttgtaaccaatatttccggcttccaggctcggaaaaaccatcacattggccttgccctgtagcgggctggcaggcgctttttgcgccgccacttccggcacgaaggcggcgtcaaactgtaactcgccatccaccaccagctttggtgcgcgctcacggacgatttctgtcgcctgctggacgttagcaacacaggggtgacgggcgctaccattgctggaaaagctcagcatcgccacgcgcggctcttctccggtgatggcgcgccaggtttcggcactggcaagcgcgatatccgccagctgcgccgccgtcggctgtggcaccacgctgcaatcggcaaagcccaacgccgggccgctgtactgtggcaacatcaggaaaatggaagagagcgttttacagcctggctgcaagccgataatgcgtaatccggcacgcagcacatttgccgtggaagagaggttgcccgcgatacagacatccgctttaccggcgctgaccattgctgcggcgaacatcagagggtcggtaagtttttccagcgcatccggcggcgttttttcgcccgcgcgggccagccagcgatgagcaaattcttcccgcattgcgaggttgccatgcggatcaatcacctgtagcccgtccatcgccacgccgtgactgagcgcaaactgacgaagttcaaacggattggcgaccagaatgggcgttgccagaccttgttgatgtaaatattgcgcggctttcagcacacgttggtctaacgcatccggaaaaaccactctggcgggcgctcgcaacgccagttcacgacaacgttcaataatcattgcgtttcccccagtcgttgttggatctgcttcaccgttagcggctgcttcgttacgctcaggatcatcatcacgtagaccgtgctgctaaggcggttcagcgcctgcaaaatgtccgggcgtaatacttcaaagctgcgggtgataaagacctgcgccgctacggtttcggtttcccgcactttggtgcgtagcagattgagcaacgcagcatcgcgcccgtggctggcttccggcaccagatgatcgtggtcgagatagcgcagcggctgatgagaaagccgatgcagatcttcgtcagaaagcccgacaatcgcctggcagcccagcggttcccccagcgcatcggcgcgcataatgttgccaagacggctacggatatccgccagccacggctgccacggttccgccagttcaatttgcagccacactgccagcgcaatggtgctgtcgagaaccgcgcgaaaacccagacgcggatcgcttttggcgaccattttttccgcgctcaggtgagtcagcgtatccggcttttttgccaccggctggcgacacagttcgcagcacgcctgcggatgttcatcgctactggtcagcccatgaacgggctgcggctgctgctgttcatcgtcaacaaacaggcggccctgctcgtcaataaacttgatgcgcagatggcggctttccagcaactcccgggcagagggcgtcaggcgactgtccgcagggagatggatctctgcgccttcgctgagcgtatggttcgctcttagccatgcttcggtgatgaaatctttcatagggattgccagttagccggccaggcgacatacaggaatttcacgctggatgtcgtaccaaattcgatgctggagcctttcgggataaacatcacgtcgcctgctttggcgatcatggtttggccttcgtggcgaacatgcagctccccttccagcaccatgtcgatttcgtcgtagttcagggtccacgggaagaatgcgttctcccactgcataaaaccggcggccatgctgctgccgtcgtctccggtcacaagatcagtcaagcccacgcaatgcggctctgcgccgtcgaaacgaccaaacttgacgctactgccatcaatcactttgatgccgcctttgccggtcacgcttttgaagctcggctgcattgcgccctgctccaggctctgtttttccttcatcactttttccatcagctgtgcgaccaggctttcggtaaactggccttccggcagctgggcaatgatggtttcgcggatgcgctggctttcggttttgtcggctggcacgctggcgggcacggacgccgttaccgggatgctttcatcacattcggtgatggtaaaacccagtagatccgccacttcacgggcttccggggtaataatgctggcgcgcagaaccacggacattgcctgttcgccgcgcgcgtgtgcttcacgaatatcattcgctgtgatgagttttttcacctgcttcctcctgtttggtgagagatgccagataatccaccagttgctgcacgctttgcgggtcgtggctgtttagctcgaacatcggctcttcgaaacccgtctcaagcaataactttcgcgttgcggcgacgtcagcatctggcatgtccgttttactgatgacggcgatttgccgtttgctgacgccaatatccagcaacccggcaggcaaccgactttccgggtcatttgcgccatggacatagatcagcatgtctacatcctgtagcgtggtaattaaggcgtgataccagcggggatggttaaaatattcacccggcgtatcaatatcgcccttatcattaaattccacggcctgtgtttttctggcgagggtataattcccctgcaacgcattaaataacgttgtttttcctgccccgacgctacccacaaacgcaattcgtttcatgaatgcctcgtattaacttttggtcatttcacaaagcgtataatttaataagcgacctaaaccgctgacggtttgacttaacgcttcttctactgcgcccacgctgccataaatcaccaatgcaccgctgaatcggtcgagaaaaccgatatgcacatcagcggctttcagcgctaaatcaccggcgatcatcgccgtttcgccgggagttagcgtcataatgccaattgcgcccgcatccggaacgccgattttcttcgccagttcctcaccgggatgcgcgatgagatgcgccagtgtgacctgtttgccgggcacaaattcctgaatgatgcgttctttatccatgagtcgccgcctgtgaaaaactttcgtgtatcgtgacaatttttcgtcagagtaaataacaaaattcggcaagcgcgtttaaaaggtgaggtagatcactaagaatggagagatattcgctgtggtgcataaactttcatatgcaacgcatgaatataaataaaataatatcgagatattatatagactgcttttttttattattcgcaaactcagtaataagctttactaatatattgcagctaaactgcttaccctgaatattcagggtaagcgtgagagttaaaaaaaattacagcggttgggtttgcgcttctaccacggccagcgccaccatgttgacgatacgacgcacgcttgcgatcggcgttaacacgtgaaccggtttcgccacacccatcagcaccgggccgacagtcacaccttcgctgctggaaacacgcagtaagttgtaactaatgcgggcagcttccatgttcggcatcaccagaatattggcggaacctttcaaagagctgtccggcatacggtcgttgcgaatcgcttccaccagcgctgcatcgccgtgcatttcaccatcaatcatcagttctggtgcacgttccctgaccagttccagcgcctgacgcattttgctgctgctcgggcagtcagaagaaccaaagttggagtggctcaacaaagcaacgcgcggctcaataccaaaacgacggacagtttctgccgccatcaaggtgatctccgccagctcttctgcatccggttcatcattaacatatgtatcggcaataaaggtgttaccactcggcagcagcagcgcgttcatggcacctgcggtgtgaacgccatcgcgataaccaaagacatttttcaccacgctaaaatgttcatgataatcacccaccgtaccgcaaatcattgcatcggcttccccacgctgaaccatgatcgcgccgatcactgtcgggttactgatcagcgcccgctgcgcctgttcctgagtgacgccgcgacgcttcatgatctggaagtattcggtccagtactctttaaagcgcggatcggattcgttattgacgatctcaaaatcaacgcccgctttgatctgcaagcccagtttctgaatgcgcatttcgatcacgttcggacgaccgataaggatcggtttcgccagtcccagcgttaccagttcctgagtggcatgcagaacgcgcgcctcttccccttccggcagaacaacgcgcttcggcgctttgcgagcctgggagaaaatcggcttcataaacaggttggttttgtaaacgaactcagtcagcttgtcgatgtagacgtcgaaatcagcaatcggacgagtcgccacgccgctctccatcgcggctttagcgaccgcaggagcgatcttaacgatcaagcgcggatcaaacggttttggaatgatgtattccggaccaaagctcagatcctgatcgccatacgcactagccaccacttcgctctgttccgcatgggcgagttctgcaatcgcacgtaccgccgccagtttcatctcttcgttgatggcggttgcgccaacgtccagcgcgccacggaagatgaacgggaagcacaggacgttgttcacctggttcggatagtcagaacgaccggtgcaaatgatggcatccggacgcacttctttcgccagcggcggcagaatttccggttccgggttcgccagcgccaggatcattggcgcacgagccattttcttcaccatttcctgggtcagcactttcgggccggaacagcccaggaaaatatccgcgccttcaatcacatcatcgagggtacgtttgccgtcatccaccaccgcatatgcggctttggtttccgccatgtttggctcacggccctgatagataacgcctttactatcgcaaaccacgatgttatgtttttgcagacccagcgctaccagcaggttcatacaggcgattgctgcggcacccgcgccggaaaccaccatccgcacgtcggagatgtttttctccaccacgcgcaagccgttgaggatggcggcagtgctgataattgccgtgccgtgctgatcgtcgtggaataccggaatattcatccgctcgcgcagtttctgttcaatatagaaacattctggcgctttaatgtcttcgaggttgatgccgccgaaggttggttcgagcgcggcgacaacttcaataaatttgtccgggtcgagttcgtcaacttcaatgtcaaatacatcaatcccggcgaatttcttaaacagaacgcccttgccttccatcaccggtttgcctgccagcgcgccaatgttgcctaaccccagcaccgccgtaccgttagagatcaccgccaccaggttacctcgggcggtatatttgtaggcttttaacgggtctttttcgatttcaagacaaggtgcggcaacgcctggactgtaggccagcgccagatcgcgctgtgttgccagaggcttggttggagaaacctggattttccctggaactggaaattcatggaaatcaagtgcactttgttttaactggtcatccatttggttgttcctttcacgtaacgttcacaaataaagtgtgtgggcaacagcccctgcccacaacgtggcgcacattattaccctgccggagtctacagactttgagcaagtccaaactctcaccattaatataatgttttggtaataatcctataacactgatgttacctgcttaatccagcaataccatgcctgtctgctatgcttttttgatgcgtttagcgaaatttctcagaagtgtgaattaacgcactcatctaacactttacttttcaaggagtatttcctatgaacgagttagacggcatcaaacagttcaccactgtcgtggcagacagcggcgatattgagtccattcgccattatcatccccaggatgccaccaccaatcctagcctgttactcaaagctgccggattaagtcaatatgagcatttaatagacgatgctatcgcctggggtaaaaaaaatggcaagacccaggaacaacaggtggtcgcagcgtgtgacaaactggcggtcaatttcggtgctgaaatcctcaaaatcgtacccggtcgcgtgagtacagaagttgatgcacgcctctcttttgataaagaaaagagtattgagaaggcgcgccatctggtggacttgtatcagcaacaaggcgttgagaaaagtcgcattctgatcaagctggctagcacctgggaaggaattcgcgcggcagaagagctggaaaaagaaggtattaactgcaacctgacgctgctgttttcttttgcacaggcacgggcctgtgcggaagcaggcgtttttctgattagcccgtttgtcgggcgtatttatgactggtatcaggcacgcaagccgatggacccgtatgtggtggaagaagatccgggcgttaaaagcgtgcgcaatatctacgactactataagcaacaccactatgaaaccattgtgatgggcgcgagcttccgtcgcaccgaacaaatcctcgccttaaccggctgcgatcgactgactatcgcaccgaatttactgaaggagctgcaggaaaaagttagcccagtggtacgtaaattaatcccaccttctcagacgttcccacgcccagctcccatgagcgaagcggagttccgttgggagcacaatcaggatgcgatggcggtagaaaaactgtctgaaggcattcgtctgttcgccgttgatcaacgcaaactggaagatcttcttgccgccaaactataaaccagccacggagtgttatatgtcccgaaaagaccttgccaatgcgattcgcgcactcagtatggatgcggtacaaaaagccaactctggtcatcccggcgcgccgatgggcatggctgatattgccgaagtgctgtggaacgattttcttaaacataaccctaccgacccaacctggtatgatcgcgaccgctttattctttccaacggtcacgcgagcatgctgctctacagtttgctacatctgaccggttacgacctgccgctggaagaactgaagaacttccgtcagttgcatagcaaaaccccaggccacccggagattggctatacgccaggcgttgaaaccaccaccggcccgcttggacaaggtttggcgaacgccgtcgggctggcgatagcagagcgtacactggcggcgcagtttaaccagccagaccatgagatcgtcgatcacttcacctatgtgtttatgggcgacggctgcctgatggaaggtatttcccacgaagtctgtagcctggcaggcacgctgggactgggcaagctgattggtttttacgatcacaacggtatttccatcgacggtgaaacagaaggctggtttaccgacgatacggcaaaacgttttgaagcctatcactggcatgtgatccatgaaatcgacggtcacgatccgcaggcggtgaaggaagcgatccttgaagcgcaaagcgtgaaagataagccgagcctgattatctgccgtacggtgattggctttggtagcccgaataaagcaggtaaggaagaggcgcacggcgcaccactgggggaagaagaagtggcgctggcacggcaaaaactgggctggcaccatccgccatttgagatccctaaagagatttatcacgcctgggatgcccgtgaaaaaggcgaaaaagcgcagcagagctggaatgagaagtttgccgcctataaaaaggctcatccgcaactggcagaagagtttacccgacggatgagcggtggtttaccgaaggactgggagaaaacgactcagaaatatatcaatgagttacaggcaaatccggcgaaaatcgctacccgtaaggctagccaaaatacgcttaacgcttacgggccgatgctgcctgagttgctcggcggtagcgcggatctggctcccagcaacctgaccatctggaaaggttctgttagcctgaaggaagatccagcgggcaactacattcactacggggtgcgtgaatttggcatgaccgctatcgccaacggcatcgcgcaccacggcggctttgtgccgtataccgcgacgttcctgatgtttgttgaatacgcccgtaacgccgcgcggatggcggcactgatgaaagcgcggcagattatggtttatacccacgacagtattggcctgggcgaagatggtccgacgcaccaggctgttgagcaactggccagcctgcgcttaacgccaaatttcagcacctggcgaccgtgcgatcaggtggaagcggcggtgggctggaagctggcggttgagcgccacaacggaccgacggcactgatcctcagtaggcagaatctggcccaggtggaacgtacgccggatcaggttaaagagattgctcgtggcggttatgtgctgaaagacagcggcggtaagccagatattattctgattgccaccggtagtgagatggaaattaccctgcaagcggcagagaaattagcaggagaaggtcgcaatgtacgcgtagtttccctgcccagcaccgatattttcgacgcccaggatgaggaatatcgggagagcgtgttgccttctaacgttgcggctcgcgtggcggtggaagcaggtattgccgattactggtacaagtatgttggtctgaaaggggcaattgtcgggatgacgggttacggggaatctgctccggcggataagctgttcccgttctttggctttaccgccgagaatattgtggcaaaagcgcataaggtgctgggagtgaaaggtgcctgatggtgattgccggatgctgattgccggatgcgacgctgacgcgtcttatccggcctacagcgtcttatccggcctacatgtcccgccattttgtttaacgggtgatccacaacgtgggccaggcgtctggcccatgccagttatcgcaggtgggttctgcggcgtaacgcaccaggcgaaaacgctgaccgtcaaagcgccagcgcgcctgaatgccacaatcgcttaatccgcgccctttcgctaaggtcaccagttcacggcttttctcatcaaatgttgcgttcatcagttccagttcattcgtctcctgaccgttgttgaacggcaaacgcaaccgaaccgggcggctagctagtggctttttacggctcacaatccatgccaaatcaatggtgttataggcccctgcctcacagctaatcatcatcagcgctttatcatcagtcagcgcagtgacattcacctcacgacgcaatggatcaaggctgcagcgcagaccattcatccgccagtttccataatccagcaaatcgttgcgttcttcgagactgagtggcgtcggcgttgggttaaccaccgcgacctctttcagcgcaggcgcgggcggtacgctgagcggcggttcgtcccctttcttgatccacgcggtttcactgccaacgcgcttttgctgagcatcaataaacaacaacgctgcttttaagccactcagagaaatggtctgatcgccatcgcgtaaggtgattgccttcccttcctgaatcatctgcaaaaacgcggtgatggttgccgtatcatcggttactaataaccatggactaatccgccacttgtcaccacttaacgccaacggctcgccatctaacagcagccgtggcgctatctccccttcactcgcctccgggctcttcaatccgccgcgctcaatacgtaaaacggcatcggtatgcgccccggcgctgcggctcagggtcatcaccagtccattatgatcgcccgtattacgcgccacgcagaaattttggttattacaggtgacctgccagtcggaaaacgcccgttgcgctggtgccgcccacaccaaagacgtcggcaacaaagcgaaaaaaaagagaaggaaaatgcgatagcgcatggacggtacgaccccagaagttcaaacaaacagcacaagtcgtatcttcgttgcgcaggtagcgcggctcaatcggatttgtcggattgagccaataataaacaacgaaatattattgttatttttcagtccattaaatgactcgtttgcaaatagttaagcaataacaccgtcttaccgtcacgtatctcgccggttttgatcatctccagcgcctggctgaacggcagctcgagcacttcaatatcttcatcttcgacaccgccaccggcgttagcgcgctgattgtcactgtattcggcgataaaaaagtggattagctcagtcacaccgcctgggctcatatacagttcaaataatttgcgcacttcacccacttcatagcccgtctcttcaatcgcttctttgcgaatacacacttccggttcgtcgttatccagcagcccggcgcagctttcaatcagctgcccgctttcattgccattaacccaggtagcgacacggaactgacgaatcagaaccacggtctttttcttcgtgttgtacaggaggatcgtcgcaccattgccgcgatcgtacacttcacgtttatggcggataacttcgccgtctttgcgcgtgagatcgtaagtaatgttgtgcagggtgaaatagttatcggagagaattttgtctttaatgagggtgatttgttgcgtcataccgactccacagcgcgaaatgaacaattatcttacgctgtgaagtcgggtttgtctgcgcaggctatcagtgagatttgacactttttacccccagccagtcaataatcccctgtgccgcatgacgtccttctgccattgcggtaaccaccagatccgcaccacgcacggcgtcaccaccagcgaagattttcggattggtggtctggtaacggtactggctttccacatccgcgatgatgcggccccatttgtctaccgttacaccgtggctctccagccacggcatcccgtgcggattgaagccaaacgccataatcaccgcgtcggctggcatgacaaattcactgccttccaccggcactggacgccgacgcccctgggcatccggctctccaagacgcgtgcgcaggaaacgaatcccgcagacgtgaccttgttcattcagctcaagcgccaccggctggacgttaaattcgaagttggccccctcttcgcgggcgttcttcacttctttcttgctgcctggcatgttagcttcatcacgacgataagcgcaggtgacgttactcgcgccgtggcgcagtgcggtacgcacacagtccatcgcggtgtcgccgccgcccagtaccacgacgttaagtccggcggtattgataaacggctcttccggtagctcttcgagccccatcacctgtttagtgttggcaatgaggaacggcagcgcgtcataaacgcccggcgcatcttcattgggtaaacccgctttcatggaacggtaagtgcctacgccaacgaagaccgcgtcgtattgttccaaaaggctatccaaagagacatctttacccacttcacaattgagttcgaagtgaatccccatcgcgctgaagatttcccgacggcgtgccagcagggatttatccagtttgaaagaaggaatgccgaaagtgagcaagccaccgatttctggatggcgatcgtacaccgtcacccccacgccattgcgggtcagaacatccgcacaggccagccctgccggacctgcaccgataatcgccacccgcttgtccactttggtgacatggcttaagtcaggacgccaacctttcgccaacgcctgatcactaatgtagcgttcaatgttgccgatagttaccgcgccgtgctcatcgcgaatagtacaggcaccttcacacaaacggtcttgcggacaaacgcgtccggtaatttccggcagggtgttggtctggtgagaaagctcgacggcggcgtcgatgtttccggctttcaccagttcaatccactgcggtatatggttatgcagcgggcaggtccattcacaaacgctgtgctcgccgcacttaaggcagcggctggcttcccgttgtgcctggtcggcgcgaaatggcagataaatttcatcaaaaccggttttgcgcgcttcaatcgccagtttatccggctcgccacgcgcgggcgttgcctgcatttgttcgactttactcattaccggcatttcttgcgccgcggtactggcatgccacggttgatgttcctgacgcgcggtgcgcaagcggcgggatttcgccatgccggagagtgcgacgtcagtgaccagttgcagcgcgtccgccgggcaattctcaacacaggcaggaccgttttcgcgccccgcacaaaggtcgcatttatgcgccgtggcttttacttttcctgccgcgacgggtgtcaggacgatttgcatcgtaccaaaaggacaggccaccacgcaggatttacagccaatacacttttgctgattgacctgaatgctgtcatcaacgtggctgattgcgccattagggcagctacgggcgcagggcgcatcttcacaatggtgacaggtcactgcactacgttgctgttgatgtttgataaccgtaattcggggatgaaaatggtgttggctcaggacatgttgctcatcattgtgagccatgacacaggcgatttcacaagcatgacaacccagacattgctgactgttggccataataaaacgattcataacgaccttcttttttggttgtaaaaaccttattctttatatgagtgttgttattacccgacttacaggggaatcggcaatgttcatgtgcccagaataagtaactatttcgctataaactgtggcagatcaaataatcccatcactgactaaattgcgtttcagcgaactggaacattaatgattttttgtggagaagacgcgtgtgattgttaaacgacccgtcagcgccagtctggcccgggcctttttttacattgtgctgctgagcattctttccacgggtatcgctctgctaactctggcgagcagtttgcgcgacgctgaggctatcaatattgccggaagcctgcgtatgcagagttaccgcctgggctacgacttgcaaagtggcagtccacaactcaatgcacatcgccagttatttcagcaggcactgcatagtccggtattaaccaacctcaacgtctggtatgtgccagaagcagtaaaaactcgctatgcgcatctgaatgccaactggctggagatgaataatcggctcagcaagggcgatttgccgtggtatcaggccaatattaataattatgttaatcagatagacctgttcgtactggctttacagcactacgctgaacgcaaaatgctgctggtggtggcgatttccctggctggcggcatcggtattttcacgctggtcttttttactttgcgccgcatacgccatcaggtggttgccccgctgaatcagctggttaccgccagtcagcgtattgaacacgggcagttcgacagcccgccgctggataccaacctgccgaatgagcttggtctgcttgcaaaaacctttaaccagatgagcagcgagctgcataaattgtaccgtagcctggaagcgagtgtagaagaaaagacccgcgatctccacgaggccaagcgtcgtctggaggtgttgtatcagtgtagccaggcgctgaacactagccagattgatgtgcattgtttccgccatattttgcagattgttcgcgacaatgaagcggctgaatatctggagttaaatgtcggtgaaaactggcggattagcgaagggcaaccaaacccggaattgccgatgcagattttaccggtgacaatgcaagagacggtttacggcgaactgcactggcaaaatagtcacgttagtagtagtgaaccgctgcttaacagcgttagcagcatgctgggacgcggtttgtactttaatcaggcgcagaagcattttcagcaattattgttgatggaagaacgtgcgaccatcgcccgcgaattgcacgacagcctggctcaggtactttcttacttacgtatccagttgacgttactgaagcgtagcataccggaagataacgccaccgcacaaagtatcatggccgatttttcccaggcgttgaatgatgcttatcggcagttacgcgagctgttgactactttccgcctgacgctgcagcaggcggatctcccctccgcattgagggaaatgctggatacgttacaaaatcaaaccagcgccaaactgaccctcgactgccgtctgccaaccctggcactggatgcgcaaatgcaggtgcatttgttgcaaattattcgcgaagcggtgctgaatgcgatgaagcacgccaacgccagcgaaatcgccgtcagttgcgtcaccgcgccggacggcaatcacacggtttatatccgtgataacgggattggtatcggtgaaccgaaagaacccgaaggtcattatggtctgaatatcatgcgcgaacgcgcggaacggctaggtgggacgctgacttttagtcaaccttccggcggcggcacgttagtgagtattagctttcgctctgcggagggtgaggaaagtcagttaatgtaatgcctcctactgaccaaagaatacttgcacttaaggttcagtataaaagggcatgataatttacattaactcctttttttctccacgattggctcgtaccttgccgctacagtgaagcaagtcaagcctacaacgatacgcagaaacacgaggtcctcttttaatggcgaatttctttattgatcgccccatttttgcctgggtgctggcaatcctgttgtgtctgacaggtaccctggcgatttttagtttgcccgttgaacaataccccgatctcgcgccaccgaatgtgcgagtgaccgctaactatcccggcgcaagcgcccagacgctggaaaacaccgtgacccaggttatcgagcaaaatatgaccggcctcgataatctcatgtatatgagttctcagagcagtggcaccggtcaggcatctgtcactttaagttttaaagcaggcaccgatccggacgaagccgtgcagcaagtacaaaaccagctgcaaagtgccatgcgaaagttaccgcaggcggtgcaaaatcagggcgtgacggtgcgtaaaaccggcgataccaacattctgaccattgccttcgtctctaccgatggtagcatggataaacaggatattgctgattatgttgccagtaatattcaggacccgttaagccgcgtgaatggcgtcggggatatcgatgcctatggtagccaatattccatgcgtatctggctggacccggcgaaactcaacagtttccagatgacggctaaagatgtcactgatgccattgagagtcagaacgcgcagattgcggttgggcaacttggtggtacaccttccgtcgataagcaggcgctcaacgccaccattaacgcccagagtctgctgcaaacaccagaacagttccgcgatatcaccttgcgggtcaatcaggacggcagtgaggtaaggctgggcgatgtcgccaccgtcgaaatgggggcggagaaatacgattatcttagccgcttcaatggtaagccagcctccgggctgggggtaaaactggcctccggcgctaacgaaatggcgacagcggagctggtgctcaatcgtctcgacgagctggcgcagtatttcccgcatggactggaatacaaggtggcgtatgaaaccaccagctttgttaaagcctccattgaagacgtggtgaaaacgctgctggaagctatcgctctggttttcctcgttatgtatctgttcctgcaaaacttccgcgccacgctgatacccactatcgccgtgccggtggtgttgatgggaaccttctccgtactttacgccttcggttacagcgtcaacaccttaaccatgttcgcgatggtgctggcgatcggtctgctggtggatgacgccatcgtggtggtggaaaacgtcgaacgtattatgagtgaggaaggactcactcctcgcgaagccacacgtaaaagcatggggcagatccagggggcactggtcgggattgcgatggttcttagcgcggtatttgtaccaatggccttcttcggcggcaccaccggtgccatctatcgccagttctctattaccattgttgcggcgatggtgctgagtgtactggtagcgatgatcctcactccggctctgtgtgccacactacttaagccactgaaaaaaggtgagcatcatgggcaaaaaggcttttttgcctggtttaaccagatgtttaaccgcaacgccgaacgctacgaaaaaggggtggcgaaaattctccaccgtagcctgcgctggattgtgatttatgtcctgctgcttggcggcatggtgttcctgttcctgcgtttgccgacgagcttcttaccgctggaagaccgtggcatgtttactaccagcgtacagttgcccagcggtagtacgcaacaacagaccctgaaagtcgttgagcaaatcgagaaatactacttcacccatgaaaaagacaacatcatgagcgtgtttgccaccgttggttctggccctgggggtaacgggcaaaacgtggcgcgaatgtttatccgcctgaaagactggagcgaacgcgacagtaagaccggcaccagctttgccattatcgagcgtgcaacgaaggcgtttaaccaaattaaagaagctcgcgttatcgccagcagcccgccagcaattagcggtcttggtagttctgcaggttttgatatggagttgcaggaccacgctggagcgggtcacgatgcgctgatggcagcacgtaatcagttgctggcgctggcggcggaaaacccggagctaacccgtgtgcgccataacggcctcgacgacagtccgcagttgcagattgatatcgaccagcgtaaagctcaggcgctgggcgttgctatcgacgatattaacgacacactgcaaaccgcctggggtagcagctatgtgaatgactttatggatcgcggtcgcgtgaagaaagtctatgtgcaggcagctgcgccgtatcgcatgctgccagatgacatcaatctctggtatgtccgaaataaagatggcggcatggtgcccttctctgctttcgcgaccagtcgctgggaaacaggcagcccgcgtctggaacgctataacggttattctgcggttgagattgttggggaagccgcaccgggggtcagtaccggtacggcgatggatattatggaaagcttagtgaagcagctgccaaacggctttggtctggagtggacggcgatgagctatcaggagcggctttccggcgcgcaggctccggcgctgtacgccatttccttgctggtggtattcctgtgtctggctgcgttgtatgaaagctggagcgtgccgttcagcgtaatgctggtcgtgccgctgggggtaatcggcgcgctgctggcaacctggatgcgcgggctggaaaacgacgtttacttccaggtgggcctgttaacggtcattggtttaagcgcgaaaaacgccatcctgatcgtcgagtttgctaacgagatgaaccaaaaaggccacgacctgtttgaagcgacgctccacgcctgccgtcagcgtttacgcccgattctgatgaccagcctggcatttatcttcggcgtattgccaatggcaaccagcacgggtgccggttccggtggtcagcatgcggtgggtactggcgtaatgggcgggatgattagcgccactattctggctatttacttcgtgccgctgttctttgtgctggtgcgccgccgcttcccgctgaagccgcgcccggaataagcaataaaaaaggcgacatgccaatgtgtcgcctttttcaactttccgattaagaacctgctcagcgggttcttgctgtttgtactttgtctcaggaattacttacgaagcataacttcgataaagtctttccagttccccagttcacgttcaatcataacaacctctcttataattatgggtattctacggaaacaatataccgtggtgaagctaatttactcgattgctgcgatgactacctccgggggacaaatcttatgtaaatactatggtcctgcggtgatgatttgtatgtgatacacagcaacatttcgagatattcatacggcatctaatactgatttaattctggttaaaatacagacagataacaagatgaatattcttaatgtttacgttaaaaatgtttaatattatttaatagttgttaatttgaatacttcgataatgttatatttcctgataatcatttgcaggcaaaatgttttcacccttaaatgagtatttattctcataaatcgaaaaaggattcattatggttacactttacggtatcaaaaattgtgacaccattaaaaaggctcgccgttggctggaagccaataacatcgactatcgttttcatgattaccgcgtcgatgggctggacagcgaattattgaacgattttatcaacgaattaggctgggaagcgttactcaacacccgtggtacaacctggcgtaaactggacgaaaccacccgcaataaaatcaccgatgcggcctctgcggcggcattaatgactgaaatgcctgcaattatcaaacgtccattgctctgcgtgcccggtaagcctatgctgctgggtttcagtgattccagttatcagcaatttttccatgaggtgtaatctatgagctgcccggttattgagctgacacaacagcttattcgccgcccttccctgagtcctgatgatgcaggatgccaggctttgttgattgaacgtttgcaggcgatcggttttaccgttgaacgcatggactttgccgatacgcagaatttttgggcatggcgtgggcagggtgaaacgttagcctttgccgggcataccgacgtggtgccgcctggcgacgccgatcgttggatcaatcccccgtttgaacccaccattcgtgacggcatgttattcgggcgcggtgcggcagatatgaaaggcagcctggcggcgatggtggtggcggcagaacgttttgtcgcacaacatcccaaccatacggggcgactggcatttctgatcacctctgatgaagaagccagtgcccacaacggtacggtaaaagtcgtcgaagcgttaatggcacgtaatgagcgtctcgattactgcctggttggcgaaccgagcagtatcgaagtggtaggtgatgtggtgaaaaatggtcgtcgcggaagtttaacctgcaaccttaccattcatggcgttcaggggcatgttgcctacccacatctggctgacaatccggtacatcgcgcagcacctttccttaatgaattagtggctattgagtgggatcagggcaatgaattcttcccggcgaccagtatgcagattgccaatattcaggcgggaacgggcagtaacaacgttattccgggtgaactgtttgtgcagtttaacttccgcttcagcaccgaactgactgatgagatgatcaaagcgcaggtgcttgccctgcttgaaaaacatcaactgcgctatacggtggattggtggctttccgggcagccatttttgaccgcgcgcggtaaactggtggatgcggtcgttaacgcggttgagcactataatgaaattaaaccgcagctactgaccacaggcggaacgtccgacgggcgctttattgcccgcatgggggcgcaggtggtggaactcgggccggtcaatgccactattcataaaattaatgaatgtgtgaacgctgccgacctgcagctacttgcccgtatgtatcaacgtatcatggaacagctcgtcgcctgatgagtggttctgcaagaggaaataagcatggactggctggctaaatattggtggattctggtgattgtctttttggtaggcgtcctgctgaacgtgattaaagatctcaagcgcgtcgaccataagaaatttctcgccaacaagccggagcttcccccgcatcgtgatttcaacgataagtgggacgatgacgacgactggccgaaaaaggatcaaccgaagaagtaagctgagtgctcaaccgtaggccggataaggcgttaacgccgcatccggcaatggtgaacgatgcctgatgcgacgctcacgcgtcttatcaggccaggtaatctgtcttttacatcatttcaatcacatcatcatcgccaggcttaccgccacttagcgcttcgtcgaaataatgtttcggaatggtataacgcaagtgatccagggcaaattgcatactgcgattgtcgatcgcatggcctaaatcctccacgatatccagcgtcacgtcaccaccggcactgattaacgcttcctgcgccgcaaccgcatgcgccagatcgataaccggatcttcaccgccatgaatcaggtgaattgtcgtggctgtagacgcagtttccggcaggctcgcatagcgtccgttaaaagcaatgacgcgactagcaaggcccggttcggctttaatgctctccagcaccataatcgcgccttgagagaaaccgatgagcgccgtggcgttagcccctactccgctctgtttctgccagtagcgcaccgtttcaataaacgtcggcatgatcgcatccacacgcgcctggcgattatcttccgtaataccctgcacgctaaaccactgacgccccgccggattaccgctcggctccgcgccaccgacactcaccaccagcgcatcaggaaacagcggtgcaaaccagttgcctatttcccccattgccaccgggttatccccgacaccgtggaaaagcagtaacaactgttgcgcaggtttatccgggctttgaacaacaaaatggtcatgtttcatggcgaactccttaactgatgtcattaattttacgccgctgactcacaatgaccatgagataaaattgaaggagtcagtgaaataattgccattgcgttatgcgatcgcgcagacgctcagtgcgaacatcattaagtgcgaacagcgcctgcgcggcctcttcccgctgacggaccagtaacatcttgcggccactaagtttaagtgtggtacataactgcgcatcactggcgtttttctgtaaacgcccacgcagcgccggtaatgccagttcactggtttgtaacagacgcaataagcaacctaagctcgttaatagcggacgatgagcgaaagcaaaaccggccagttcaagccagtcgtcgtcagaaaggacggcatcgtttagtggatcaacaggaagcgtttcgccattccactgcgcgagagcttgcgcatcgcgacgtaaacggtaatgctcacgttcagccagctgtttacccgcatcactcatcggtaacagcgccatcgccgtatagcaaccgctgctggcttcccgatgattacccatccgcaccagcacaaaaccgcagcgttgccagaaacgccataactccccggtgtaaccaaaactcacgctaagatagtcgaggtcttgcgtatattgcaaagcaccagcaataagttgccgccctgtgccttcccgctgacgagccggatgaactgctatccggctgacccgccgtccacgcaatgtcgccgccagtggattgttgccgtgcgccgccaggctctgggccaccagattaccccgcgggcgacgaaaacctgcccataccgcctgactgagttgttgagataatccaccctcatccaccagccacagcgccccggcaatctcgttttcgccagccgcctgtaaaaaatgttgccctggtgcatccatcatccggcgtaaatccagcgggctagtccgatagtgcgcaccagacaagagctgataaacctttaacggcgtttctggatcgctttgccataacgtctgttcaaatgcggaaatgacaatattgccttgtggtgtatgggtgaagttttcatcgtcaaaaaccagtgcctcgctgaccattttttccagcgggcatccctgcgcccagcggatcggctgttgcagttcaaaacggtgtaaatgcggaaagcgagcgcaaaatttcagcaaaaaaccacgtccggtgccttcgtagccctgcaccgtagtggttaacaacgttcgaggaaaacggcttaccagttgatgcaacaatggcgcaggtatggctgcggcttcatcgaccaccagccagtcggcttgctcatcgctggctaacaaggcatccggcgcaataaagcgaaacttctcgcccgcaaattgtgccagtacatccgtactcgcttttgcgggcgcggtgacaatcgctctgcccgcaatacgagaaatgagttgccctgccaacgcgctcttaccgcgcccacgcgcagccgttaccgctgccacgcccggcggcatggtcattagctgctttaagagttgctgttgttctggttgtggtgcgccagtcgcggggtaccagtcagtacggggagtaaaatgcgccaagctgaatggctggttttgccgccagaggatagcctcgttatccgccgtaagtacgcgtttgagatgctggacaaaatgcggcgtcgcaatagggtcagggcaatcactccagcgcaggctgtcggcatcaggttggttttcccactcttcccatacagggagtaacaaaaccagccagcttcccgctttcaacgttccgctaagtgcggcaaaggcagcggcatcaaagccgtggcgggcgtcgaataccgcatgccggaactcgcgcccaagtaaagtttgtagtgcgctgggagaacagtggttttcagcatctggccgcgggctaatccacagccagtcgccaggtaaggcatcacgcaacttaagagtatgctcaaaacaccaaccctcttccccgctcaacaccagcaagcggcggatcccttcacgtttcatttgcgctgttaatgtgtgaagcgcagtcagttcagccatccctgccccggaagttaaatgcttttaccaaaagtattgcattgtgccggatcgccgctgtcgaaaccacgtttaaaccagctgtagcgttgctgagaagtgccatgagtgaaactgtctggtactactcgcccctgactttgctgttgtaaacggtcatcgccgatggcctgcgccgcgttcagcgcctcttccagatcgccggtttccagaacgccttgctgctgcatactatgcccccagacaccggcaaaacagtcggcctggagttccatacgcacagataagcggtttacttccgcctgcgtcgcgttttgttgcagttgacgaactttcggctcgatgcctaacagtttctgcacatgatgaccgacttcatgggcgataacgtacccctgggcaaaatcgccatccgcgccaagtttgtctttcatgtcatcatagaaggagagatcgatataaaccgtgccatccgccgggcaatagaacggccccattatggactggcccgccccgcagccggtacgcgtcattccacggtacatgaccagcttcggttgctgataggtcttacccatcttctcgaactgttgtccccaggtgtcttccgtggttgccagaatcacgctggtgaattttgcggcttcgtcttcatttgggctaatactccgcgtactttgttgttgggaaaccggctgcccggtcatcaacccggttaaatcaacaccatagtagcctgcaaccagcacgactatcagtaaaatcagcccgcctttaccgcttggcaggcgaaaaccgggaccgcccatagatggaccaccagagctgttgcgcctgtcttcaacattgtcactttcacgtcgcccttgccaacgcatagatacctcaacaatatattcattatagaaatgatcgtaggtggttcagaggaagattaccacaggaaagcgggatgaaatggcggaggaatgagcgttcaatgcatatattccgagagcggttgtcttgccgtgccagctgcacggcaagatgatgaacagaaaaatcagtccagctgtacacccaggcggcgggcgacggcttcataggcttcgatcaggccaccgaggctctggcggaaacggtctttgtccattttctccagcgtttctttgtcccacaggcggctaccgtccggggagaactcatcacccagtaccacttcgcctttgtacagaccaaattccagcttgaagtcgaccagaatcagaccagcatcatcgaacagttttttcagcacgtcgttcgctttgtaggtcagctctttcatacgcgccaggttctctttgctcacccagccaaaggtttcgcagtaagattcgttgaccatcggatcgtgcatggcgtcgtttttcaggaacagatcgaacagcggcgggttcagctcaataccttcttcgattccaagacgtttcaccagagagccagcagcacggttacgcacgacacactcaaccggcaccatatccagctttttcaccagacattcggtatcggagagcagacgctccatttgagtcgggatacccgcttcagccagtttgctcataatgaagtagttgaacttgttgttcaccatacctttgcgatcaaactgctcaatgcgcgcgccatcccctgcactcgtatcattgcggaattcgagcaccaacaggtccgggttttccgtgctgtatacggttttcgctttaccacgatacaactcagcttgcttttgcatctttatcactcctgggtgtgaattaacgttttaaaatcttttgctgtctggtgtgccggatgttttgtcggatgcggcgtgaacgccttatccgaactacgtccgacaaacaaatttcgtgcgaattaccgctaaaatcgcgttttcctgcagacgcacacgtttgcgtatcatatcagaaaaaagggccggatgattccagccctgtatttttacttgctaaacgcagcctggaagacagctaccagcgcgtcgttctgactctgagtcagagtatgacctttcggatcgatgaactgtaggctgctgcggttatctaaatcgccaacctgcagtttatagtcaccggatgccaggcctggatcgctcgcgcccagttcctgccagtcgctgtcagacagcggcttataagttacggccatgttgccctggctacgggtgctgtcggtcactttcatgcccactttttccagcgccgctggcagacgttgccaaaccacattgaacggcccgcgtacgaccagcattggtaaaccggtgtcatcagctgcactttgtacgtccatagtggtggaggcacgattttgcgcagcgttcgcggcgtcagtggcagatttatccagaccggcggaaataacgttcatcatctccgtgctgtaacgctgcatggaagccgcgtctgcaaccggtttgcccgcctgttccaggttcagcagtttaaccgtaaccgcctgctgataaccctgcggcttaacagagatttgataacgaccacgatactgctcgtcttcgtccagacggttccattgtacccaatcggtggtcagtgtctgaccagcatcatcacgttgggtgatggtgtagtttttcgcctgcagcacgctaaccacctgcggccacagagtattgccacgaccattttccaccagcaaactagcggtatcgcccgtgaactgggtacgcgcgccagaaaccagtgccagcggctgggctggtggacgaatgtccagcgccttaccgacagcaccactaccgttggtcaccgggattgcataatcaccggaggtcaccggcaaaatcattccagccggggcatgaagctccgcaagcggtgccgcttccaggtaggcttcatcaccactgacctgacgcttatagcgactgtcagaactacaggcagcgagtaataaaacaaggctaacacccgcaacctttgccaggcggctcttttgaacagagtaagccatcaaatctccctaaactttacagcaaaccggcatgcttaagcgccgctctgaccgtctcacgaccactgtcggtgattggtgtcattggcaggcgcagcgtatcggtcgccacaagacccagttccttacatgcccatttcaccgggattggattgggttcgacaaatagtttgttgtgtaatggcatcagacgctgattaataacgcgtgcctcggcaaaatgcccttctgctgccagtttgcacatctgggccatatcacgcgctgcgacgttagccgtaacggaaataaccccatgaccgcccaattgcatgaagtccagcgcgctcgcatcatcgccgctcagcagaacaaaatcatcactaaccagctctttgatctggtttacacgcgttaagttccctgttgcctctttgattccgataatattttttactttcgccagacggcccaccgtttccgggagcagatcgcagccagtacgggacggcacattatacagaatttgcggcaggtcagtatgctcagcgatggctttgaaatgctgatacaaaccttcttggctcggacgattgtagtaaggggttaccgtcaggcagccgacgataccactgtcattgaagcgctgcgtcaggctaatggcttccgcagtagcgttagcgccggtcccggcaattaccggaatgcgcccatcagccagatccagcgtcatcatcaccacatcagcatgttcgtcatgatttaaggtagcggactcgccagtggtgccaacagaaacgatcgcgctagtaccgctggcgacatgataatcaatcagttttttcaagctagcccgacagacattacctttttcatccatcggagtaacaatcgcgacaatacttcccgtgaacatgggccatcctctgtgcaaacaagtgtctcaatggtacgtttggtatggcattaaaagcaagcagacagaaccgttctgattgttgtatgcatgttttttttatgctttccttaagaacaactcaccccttaaaggaataaccagtttgacactgagtagccaacattatctggtgatcactgcgttgggtgccgatcgccctggaattgtgaacaccatcacccgtcatgtcagtagttgcggctgtaatattgaagacagtcgcctggcgatgctgggagaagagttcacgtttattatgctgctttccggtagttggaatgccattactctgattgaaagtacgttaccgttgaaaggtgccgaactggatcttttaatcgtgatgaagcgcacgacggcgcgtccgcgtccgccaatgccagcatctgtctgggttcaggtcgatgtggcagactccccgcatttaattgaacgcttcacagcacttttcgacgcgcatcatatgaacattgcggagctggtgagccgcacgcaacctgctgaaaatgaacgggctgcgcagttgcatattcagataaccgcccacagccccgcatctgcggacgcagcaaatattgagcaagcgttcaaagccctatgtacagaactcaatgcacaaggcagtattaacgtcgtcaattattcccaacatgatgaacaggatggagttaagtaatgaatccactgaaagccggtgatatcgcaccgaaatttagcttgccggatcaagacggagaacaagttaatttgaccgacttccagggacagcgtgttctggtttatttctacccgaaagccatgacccccggctgtaccgtacaggcctgcggcttacgcgataacatggatgagttgaaaaaagcgggcgttgatgtgctgggtatcagcaccgataaacccgaaaaactctcccgttttgcggaaaaagagctgcttaactttacgctcctgtctgatgaggaccaccaggtgtgcgaacaattcggcgtctggggtgaaaagtccttcatgggcaaaacctacgatggcattcatcgcatcagcttcctgattgacgctgatggcaaaatcgaacatgtctttgacgatttcaaaaccagcaatcaccacgacgttgtgctgaactggctgaaagaacacgcctgattactttgctccattccgtgctggctgcgcttgcggccagcatacctcacttctcgtgatcaagatcacattctcgctttcccctgcgacacgggtgtcgaatccattttttgctgaacgttaatgaccatcatttttgtaccgttcagaatccagttaatacataacttattgaatatattgagttaatcagaatggcatcctttatgcaatatgaaatgcaatgtttcatatcattttcaaggagccgacatgaaccgctttgtggtggccgaaccactgtggtgtacaggatgtaatacctgtctcgctgcctgtagcgacgtgcataaaacgcaaggtttacagcaacacccgcgcctggccctggcgaagacgagtacaatcactgcccctgtcgtgtgtcatcactgtgaggaagccccttgcctgcaggtctgcccggtcaatgccatctctcagagggatgatgcgatccaactcaacgaaagcctctgtattggctgcaagctttgcgccgtggtctgcccatttggcgcaatcagcgctagtggaagccgtccggtgaatgcccatgcgcaatatgtttttcaggctgaaggcagtctcaaagacggcgaagaaaacgcgccaacacaacatgctttgctgcgctgggaacctggtgtccagaccgtcgcggtgaaatgcgacctgtgtgatttcttgccagaaggtccggcctgcgttcgcgcttgcccgaatcaggcgttacggctgatcaccggtgatagcctgcaacgtcagatgaaagaaaaacagcgccttgccgcaagctggtttgccaatggcggggaggatcccctttccctcactcaggagcaacgctaatggatgccctgcaattattaacctggagcctgattctctatctgtttgctagtctggctagcctgtttttactcggtctggacagactggctattaagctttccggcatcacaagcctggtgggcggcgtgattggcatcatcagcggaattacgcaattacatgctggtgtaactttagtcgcccgttttgcccccccttttgaatttgccgatttaaccctgcgaatggatagcctcagcgcatttatggtgctggttatctccttgctggtggtggtttgttctctctatagtttgacttatatgcgcgaatacgagggcaaaggcgcggcggcgatgggcttctttatgaatattttcatcgcaagcatggttgccctgctggtgatggacaacgctttttggttcatcgtgctgtttgaaatgatgagcctgtcttcctggtttctggtcattgccaggcaggataaaacgagcatcaacgctggcatgctctacttttttatcgcccacgccggaagcgtgctgataatgatcgccttcttgctgatggggcgcgaaagcggcagcctcgattttgccagtttccgcacgcttagtctttctccggggctggcgagcgcggtgttcctgctggcctttttcggttttggcgcgaaagccgggatgatgccgttgcacagctggttgccgcgcgctcaccctgccgcaccaagccacgctagcgcgttgatgtctggcgtaatggtcaaaataggtattttcggcatcctgaaagtagcgatggatctgctggcgcaaacgggtttgcctctgtggtggggcattctggtgatggcgatcggcgcaatctccgcgctcctgggcgtgctatatgcgctggcggaacaggatatcaaacggctgctggcctggagtaccgtcgaaaacgtcggcattattttgctggcagtcggtgtggcgatggtcggtctgagtctgcacgacccgctgctcaccgtggttggactgctcggcgcactgtttcatctgctcaaccatgcgctgttcaaagggctgctatttctcggcgcgggagcgattattagccgtttgcatacccacgacatggaaaaaatgggggcactagcgaaacggatgccgtggacagccgcagcatgcctgattggttgcctcgcgataagtgccattcctccgctgaatggttttatcagcgaatggtacacctggcagagcctgttcagtctaagtcgtgtggaagccgtagcgctacaacttgcgggtcctattgctatggtaatgctggcagtcactggtgggctggcagtaatgtgcttcgtaaaaatgtacggtattactttctgtggtgcgccgcgcagtacacacgctgaagaggcacaggaagtgccaaatacgatgatcgtcgccatgctactgctcgcggcactctgcgtattaattgcgcttagtgccagttggctggcaccgaagataatgcatattgcccatgcgtttaccaatacccctcccgccactgtcgccagcggaatagcacttgtacccggcacgtttcatacacaggtcacccccagtttactgttgctgttactactggcgatgcctttgctgcctggcctttactggctgtggtgtcgtagccgccgcgcagcgtttcgtcgcacaggagatgcctgggcatgcggctacggctgggaaaatgcgatggccccgagtggcaatggcgtgatgcagccgctgcgtgtggtcttttctgcgctatttcgtctacgacaacagctcgaccctacgctgaggctaaataaaggtcttgcgcacgtcaccgccagggctcagagcacagaacccttctgggatgagcgggtgatccgccccatcgtgagcgccacccaacggctggccaaagaaatacagcatctgcaaagcggcgactttcgtctctattgcctgtatgtggtcgccgcactggttgtgctgctaatcgctattgccgtctaaggaaatcaccatgagacaaactctttgcgacggatatctggtcatttttgcgttagcacaggccgtgattctgctgatgctaaccccactttttacgggtatttcccggcagatacgcgcgcgtatgcactcccgccgcgggccggggatctggcaggattatcgcgatatccacaaactgtttaaacgccaggaagttgcgccgacatctagtggtctgatgttccgcctgatgccgtgggtattaatcagcagcatgctggtgctggcgatggccttaccactgtttattaccgtttccccttttgcgggcggcggcgatctgatcacccttatctatcttcttgccctgtttcgttttttctttgctctttccgggctggataccggaagtccgtttgcgggagtcggtgccagtcgcgagttgacgctcggcattctggtcgaaccaatgcttattctcagtctgctggtattggcgctgatagcaggttccacgcatatcgagatgatcagcaatacgctggcgatgggctggaacagcccgctaaccaccgtactggcgttactggcctgtggttttgcctgcttcattgagatgggaaaaattccctttgatgttgctgaagcagaacaggaattacaggaaggcccgctgaccgaatattccggtgccgggctggcgctagcgaaatgggggctggggctgaaacaggtcgtgatggcaagtctgtttgtggccctgtttctgccctttgggcgcgcgcaagaactttctctcgcctgcctgctgactagtcttgtcgttacgctgctcaaggttttgctgatttttgtactggccagtatcgcagaaaacacgctggcacgcgggcgttttttactcattcaccatgtgacctggcttggcttcagccttgctgcgcttgcatgggtcttctggttaaccggtctgtaaggagcactgacggaatatggaaaatcttgctctgacgacgttattgctgccttttatcggcgcactggtcgttagctttagcccacaacgtcgggccgccgaatggggggttttgttcgccgcgctgaccacgctgtgcatgttgagtctgatctccgcgttttatcaggccgataaagttgccgtcacgttgacgttggtcaacgtgggggatgtggcgttgtttggcctggtcattgatcgcgtgagtacgctgattctgtttgtggtggtgtttctcggtttgctggtcacgatctactccacgggttatctgacggataaaaatcgcgaacacccgcataacggcacgaatcgttattacgcatttttactggtgtttatcggcgcgatggcgggactggtactctccagcacgctgctcggtcagttgttgttttttgaaattacaggcggctgctcctgggcgttgatcagttattaccagagcgataaagcgcagcgtagtgcactaaaagcgttacttatcactcatatcggcagcttggggttgtatcttgccgccgccacgctgtttttgcagaccggaacgtttgcgcttagcgcgatgagcgagttacacggcgacgcacgttatctggtttatggcggcatcctgtttgccgcgtgggggaaaagcgcccagctaccgatgcaagcgtggctaccggacgcaatggaagcgccaacaccgatcagcgcctatctccacgccgcaagcatggtgaaagtgggcgtttacatttttgcccgcgctattatcgacggcggcaatatcccgcatgtgattggcggcgttggcatggtcatggcactggtcaccattctttatggctttctgatgtatttgccacagcaggatatgaagcggttgctagcctggagcaccatcactcaacttggctggatgttcttcggcttgagcctctccatcttcggcagccggctggcgctggagggcagcatcgcctacatcgtcaaccacgcgttcgctaaaagcctgtttttccttgtagcaggtgcgctgagttacagctgcggcacgcgcttgttgccgcgtctgcgtggcgtattgcacaccctgccgttgccaggcgtgggtttctgcgtggcagcgctggcgattaccggcgtgccgccgttcaacggcttcttcagtaaattcccgctgtttgctgccggttttgcgttgagtgtggagtactggatcctgctgcccgccatgattcttctgatgattgaaagcgtcgccagtttcgcctggtttattcgctggtttggtcgcgttgtgcctggcaaaccgagcgaggccgtcgccgatgccgcaccgctgccaggaagtatgcgcctggtgttgattgtactgattgtgatgagcctgatttccagcgtaatcgccgcgacctggttgcagtaaggagatgatgaatgaccggttctatgatcgtaaataatctggcgggactgatgatgctgacaagcctgtttgtgattagcgtcaaaagctatcgcctgagttgcggattttacgcctgccagagtctggtgctggtgtctattttcgccactctcagctgcctgttcgccgcagagcaactgctgatctggtccgccagcgcctttatcaccaaagtgctgctggtaccgttaatcatgacttacgctgcacgaaatattccccagaacatcccggaaaaagcgttattcggtccggcaatgatggcactgctcgcggcgttaattgtcctgctttgcgcatttgtcgttcagcccgtgaagctaccgatggctaccgggctgaaaccggcgctggcggtagcgttaggtcattttctgcttggcctgctgtgcattgtcagccagcgcaatatcctgcggcaaatttttggttactgcctgatggaaaacggctcccatctggtgctggcgcttcttgcctggcgagcaccggaactggtggaaataggtatcgctaccgacgccatcttcgccgtcattgtgatggtgttactggcaagaaaaatatggcgtacccacggcacgctggacgtgaacaacttgaccgcgctgaagggataatgagatgagttattctgtgatgttcgctttactcctgctcacgccgctgctttttagcctgctctgttttgcctgccggaaacggagactttctgcgactcgcacggtgaccgtattacatagcttagggatcacactgctgctgattctggcactctgggtggtccaaactgccgctgatgcaggagaaatattcgctgcgggactgtggcttcatattgatggtctgggcggtttgttcctcgccattcttggtgtgattggctttctcaccggtatttacagcattggctacatgcgtcatgaagtggcacacggcgagcttagtcccgttacgctgtgcgattactacggtttcttccatctgtttttgttcaccatgctgctggttgttaccagcaataacctgattgtgatgtgggcggcgatcgaagccaccaccttaagcagcgcgtttctggtaggcatttacggtcagcgtagtagcctggaagctgcatggaagtacatcattatttgtactgttggtgtcgcttttggtctgttcggtaccgtgctggtatacgccaacgccgccagcgttatgccgcaggcagaaatggcgatattctggagcgaggttcttaagcaaagctccttgcttgacccaacattaatgctgttggcctttgtgtttttgctaattggctttggtaccaaaaccgggctatttcccatgcacgcctggctgccggatgctcacagtgaagcgccgagtccggtcagcgccctgctctccgccgtattgctgaactgcgcgctgttggtgctgattcgctattacatcattatttgccaagccatcggcagcgatttccccaaccggttgttgctcatcttcggcatgttgagcgttgccgtggcggcatttttcattctggtacagcgggacattaagcgtctgctggcgtactccagcgtggagaacatggggctggtcgcggtggagctaggcattggcgggccgctgggaatttttgccgcgctgctgcacatcttaaaccacagtctggcaaaaacgctgctgttctgcggttccggcaatgtactgctcaagtacggcacgcgcgatctcaacgtcgtctgtgggatgctcaaaatcatgccatttaccgccgtgctgtttggcggcggtgcgctggcgctggcagggatgccgcccttcaacatttttcttagcgaatttatgaccattaccgccggactggcacgtaatcacctgctgattatcgtcctgctgttattgctgttaacgctggtgctggcgggcctggtacggatggctgcgcgggtgttaatggcgaaaccgccgcaggccgttaaccggggtgatctcggctggttgaccaccagcccaatggtgattctgctggtcatgatgctggcgatgggaacgcatattccacaacctgtcatcaggatcctggcgggcgcttccactatagtcctcagtgggacgcacgatctgcctgcacaacgtagcacctggcatgattttttgcctagtggcaccgcatctgttagcgagaaacacagtgaacgttaatagtagcagtaatcgtggcgaagcgattctcgccgccctgaaaacgcagttccccggcgcggtgctggatgaagagcgacaaacgcctgaacaggtcaccattacggtgaaaatcaatctgctgcctgacgttgtacagtatctttattatcaacatgatggctggcttccggtcctgtttggcaacgacgagcggacacttaacggtcattacgcggtttattatgcccttagtatggaaggggccgaaaaatgctggattgtggtgaaggcgctggtcgatgccgacagtcgggagtttccgagtgtcacaccgcgcgtccctgccgcggtctggggcgagcgagaaattcgcgatatgtacgggctgattccggttggcctgccggatcagcgtcgcctggtgttgcccgatgactggccggaagatatgcatccgctgcgcaaagatgcgatggattatcgactgcgccctgaaccgacgactgattccgaaacgtatccgtttatcaatgagggcaacagcgatgcgcgggtgatccctgtcggcccgctgcatatcacctccgatgaaccgggtcacttccgcttgtttgtggatggcgagcaaattgtcgatgctgattaccgcctgttttatgtccatcgcggcatggagaaactggcagaaacgcggatgggctacaacgaagtgaccttcttaagcgaccgcgtgtgtgggatttgcggttttgcccacagtgtggcctataccaatagcgttgaaaatgcactggggattgaggtgccgcaacgagcacatactattcgcagcattctgctggaagtcgaacggctacacagtcatttgcttaaccttggcctctcctgccatttcgttggttttgataccggctttatgcaatttttccgcgtgcgggaaaagagcatgacgatggcggaattgctgatcgggagccgtaaaacctacggtctgaatctgattggtggtgttcgccgcgatattctcaaagagcaacgtctgcaaacgctgaaactggtgcgcgagatgcgcgccgacgtgagcgagctggtagagatgctgcttgctacgccgaatatggaacaacgcactcagggcattggcattctcgaccgacaaatcgcccgtgatttgcgctttgatcacccctacgccgactacggcaatattccaaaaacactgtttacctttaccggcggcgatgttttctcccgcgtgatggtccgtgtcaaagagacgtttgatagcctggcaatgctggaatttgccctcgacaacatgccggataccccactgctgaccgaaggctttagctataaacctcacgcattcgcgctgggctttgttgaagcgccacgcggtgaagacgtgcactggagcatgctcggtgataaccaaaaattgttccgctggcgctgccgtgccgccacctacgccaactggccggtgttgcgttacatgctgcgcggcaataccgtttctgacgcaccgctgattatcggtagccttgatccctgctactcctgtaccgaccgtgtgacgctggtagatgtgcgcaagcgccagagtaaaaccgtgccgtataaagagatcgaacgctacggcattgatcgtaaccgtagcccgctgaagtaaggacagaagatgctgaagttactgaaaactattatgcgcgccggaaccgcgacggtgaaatatcccttcgcgccactggaggtcagccctggctttcgcggaaaaccggacctgatgcccagccaatgtattgcctgcggtgcctgcgcctgtgcttgtccggcaaatgcgctgactatccagaccgacgaccagcaaaatagccgcacctggcagctctatctggggcgttgtatttactgcggacgttgtgaagaagtgtgcccgaccagagccatccagcttaccaataactttgaactgaccgtcaccaataaagccgatctctatacccgcgcgacgttccatctacaacgttgcagccgttgcgaacgcccgtttgccccgcaaaaaaccatcgcactggctgctgaattgttagcacagcaacaaaatgcgccacaaaaccgcgaaatgttgtgggcgcaagcgagcgtctgcccggaatgcaaacaacgcgcgacgctgatcaacgacgatacagatgtactgctggtggctaaggagcagctatgagtccagtgcttacacaacatgtcagccagcccatcacgctggacgagcaaacgcaaaagatgaagcggcatttgctacaggatatccgtcgcagcgcttacgtttatcgcgtcgattgcggcggctgcaacgcctgtgaaatcgaaatttttgctgccattacaccagtattcgacgcagaacgttttggcattaaggttgttagtagtccgcgtcacgccgatattttgttatttactggcgcagtcacccgggcgatgcgtatgcctgcacttcgggcgtatgagtctgcccccgatcataaaatttgtgtttcctacggcgcgtgcggtgtcggcggcggtattttccacgatctctacagcgtctggggcggtagcgacaccattgtccccattgatgtttggatccccggctgcccgccaacaccggccgccaccattcacggtttcgccgtggcgctcggtttgctgcaacagaagattcacgctgtggattatcgcgatcccaccggggtgactatgcaaccgttgtggccgcagatcccgccaagtcagcgtatcgccattgagcgagaagcgcggcggctggcgggctatcgtcaggggcgagaaatttgcgatcggctcctgcgccatttaagcgacgatcctacaggaaatcgggttaacacctggttgcgcgatgccgacgatccacgtctcaatagtatcgttcagcaactctttcgcgtactccgggggttacatgactgaagagtgcggggaaattgttttctggacgctgcgaaaaaagtttgtcgccagtagcgacgagatgccggaacacagctctcaggtaatgtattacagcctagctatcggccatcacgttggcgtgattgattgtctgaatgtcgccttccgctgcccactgacggaatacgaagattggcttgcactggtcgaagaggagcaagcccgacgtaagatgctgggggtgatgacttttggtgagattgttattgacgccagccacaccgccctgttgacccgggcattcgcgccactggcggatgacgcgacgtctgtgtggcaggcgcgtagcattcaattcattcatctgttggatgaaattgtgcaggaaccggccatctatctgatggccagaaaaattgcgtgagaaggatttctcattaataaggactgttgatggctatgagtgacgaggcgatgtttgccccgccacaaggaataacaattgaagcggtaaacggaatgctcgcggagcggttagcacagaaacacggcaaggcgtctttattacgcgccttcatcccgctgccgccgccgttcagcccggtacaacttattgaactgcatgttctcaaaagcaacttctattaccgctaccatgatgatggcagcgatgtgacggcaacaacagagtatcagggcgagatggtcgattatagccgtcacgccgtccttctcggcagtagtggaatggcggagctacgctttattcgcacccacggcagtcgttttacttcccaggattgcacactgtttaactggctggcgcggataatcaccccggttctgcaaagttggctcaatgatgaagaacagcaggtggcgctgcgtttgctggagaaagatcgcgatcatcatcgggtactggttgatattactaatgcagtgctgagtcatcttgatctcgacgatctgatcgctgacgtcgctcgtgagatccatcattttttcggtctggctagtgtcagtatggtactgggcgatcatcgaaagaacgagaagttcagcctgtggtgcagcgatctttctgccagtcattgtgcgtgtctgccacgctgtatgcctggcgaaagtgtattgctgacacaaacgctacaaacccgacaaccgaccttgacgcaccgtgcagatgatctgtttctctggcaacgcgacccgttattactcttacttgcatctaacggctgcgaatctgcgctccttataccgcttacctttggcaaccatacaccgggtgcattgttgctggcgcatacctcttccactctctttagtgaggaaaactgccagctactacaacacatagccgatcgcatcgctattgccgttggcaatgccgatgcctggcgtagcatgaccgatttgcaggaaagtttgcagcaagaaaaccaccagcttagcgagcagctccttagcaatctgggcatcggtgacattatctatcaaagccaggcaatggaagacctgctccagcaggtagatattgtggcgaagagcgacagtacggtgttgatttgtggtgaaaccggaactggcaaagaggtgatcgccagagcgatccatcaacttagcccgcgacgcgacaagccgctggtcaaaatcaactgcgctgccatccccgccagtcttctggaaagtgagttattcggtcatgacaaaggggcgtttactggtgcgattaatacccatcgtggtcgttttgaaattgccgatggcggcacgttgtttctcgatgaaattggcgatctgccgttagaacttcagcctaaactgctgcgcgtattgcaggagcgggagattgagcgtctcggcgggagtagaacgatcccggtgaatgtcagagtcattgccgccaccaaccgtgatttgtggcaaatggttgaagatcgccagtttcgcagcgatctcttttatcgcctgaatgtcttcccactggaattgccgccgctacgcgaccgtccggaagatatccctcttttagcaaaacatttcacgcaaaaaatggcgcgccatatgaatcgcgcaattgacgccatcccgaccgaggcactacgccagttgatgagctgggattggccgggcaacgtgcgcgagctggaaaacgtgattgagcgggcggtactgttgactcgtggtaacagtctgaatttacatctaaatgtccgacaaagccgtttactgccgacgctaaatgaagatagtgcgcttcgcagtagtatggcgcagttactgcacccgacgacgccagagaatgacgaagaagaacgtcagcgcattgttcaggtattgcgagaaaccaatggcattgttgccgggccccgtggcgcagcgacgcgattagggatgaagcgcaccacgctgctgagtcgaatgcagcggctggggatcagcgttcgcgaggtgttgtaatctgcttttgcaggagtatgcatgagaaacaaactctctttcgacttgcagttgagcgccagaaaagcggcaatcgctgaacggattgccgcccataaaattgcccgcagtaaagtgagcgtctttttaatggcgatgtccgctggcgtgtttatggcgatcggatttactttttacctttccgttatcgccgatgccccgtctagtcaggcattaacccatctggtgggcggcctttgctttacactcggctttattttgctggcggtttgcggcaccagcctgttcaccagcagcgtaatgacggtgatggcaaaaagtcggggcgttattagttggcgaacttggctgattaacgcacttctggtggcctgcggtaatctggcaggtattgcctgtttcagtttgttaatctggttttccgggctggtgatgagtgaaaacgcgatgtggggagtcgcggttttacactgcgccgagggcaaaatgcatcatacatttactgaatctgtcagcctcggcattatgtgcaatctgatggtttgcctggcgctgtggatgagttattgcgggcgtagcttatgcgacaaaatcgtcgccatgattttgcccatcaccctgtttgtcgccagtggctttgagcactgtatcgccaatttgtttgtgattccgttcgccattgccattcgccatttcgcccctccccccttctggcagctggcgcacagtagcgcagacaattttccggcactgacggtcagccattttattaccgccaatctgctcccggtgatgctgggtaatattatcggcggtgcggtgctggtgagtatgtgttatcgggctatttatttacgtcaggaaccctgaaaaatcagcccggcgaaacagttcgtcgggctgaagattattcttgcgcgatttgcccatcgggccaggcatgaatcacggctttgatcagcgtcgccaacggaatggcgaagaatacgccccagaatccccacaaaccaccgaagatcaccacgcttaaaataatcaccagcggatgcaggttaaccgcttcggagaacaacaccggcactaacaggttgccgtccagcgcctgaataatcagatacaccgcgaagcagctccagaattcagtacctgcgccaaactggaatagcgccacgccaaccaccggaatggtcaccacaaatgcgccaatgtacggaataagaacgctgaagccgaccagcactgccagcagcaggctatagttcagcccgaagagcaagaaccccagccaggtggcgatccccaccacgatcatctccagcactttgccgcggatatagttggtgatttgttgattcatctccttccacacctgtcctgccagcccacggttacgcggcagcacccggcgaacggcgttcagcatctgctctttgtctttcagcaggaagaagaccatcaatggcaccagcaccagatagacggctatggtcagcaaaccgaccaggctggcgagggaaattttcaccacgctatcgcccatggtcagcatccgactgcgcatattttcggccattgcatcaataatgcccgcgtccattaacgccggatagcggcgcggcaacgtggcggcaaagtcagaaagcttattgagcatccccggcatatcgcggattaagtagatgccctgttgccaggcgataggcagtaccacgaacgccatcagtagcaatataccgacgaaaaccaccaatacaatgctcgtcgcccagcggcgggagcagccaatagattgcagacgcacggttggccattccagcaaataggccagcacaatagccaccagcaacggagcaagcaggccactaaagaaaaagataatgccaaatccggcaactaaaataaccagcaaggcaatcgcttccgggtcgctaaaacggcggcgataccattgcatcaacatttcgagcataaagaccttccctgaacctcaagagcgggattgcgatccgcaattgtatcgaaatgtcacaaaaaagacttcgctttttatgacggattcaggaaactgaaaagtcatttgagtgggctaatcttcgccgttacactcaaaggcggcgcggtgggaacgatatttcacagtatcggtcaaatgactatctccagaaatacaggatagaggttatgttcaggcagttgaaaaaaaacctggttgcaaccctcattgctgctatgaccattggtcaggtagccccggcgtttgccgacagcgcagacaccttgccggatatgggaacctccgcaggaagcacgctttccattggtcaggaaatgcagatgggcgactattatgtccgccagctacgcggcagcgcgccgttaattaatgacccgctgttaacgcaatatattaatagcctggggatgcgtctggttagccatgccaatagcgttaagacaccgtttcatttttttctgatcaacaacgacgaaattaacgcctttgctttctttggcggcaacgtggtgctgcactctgccctgttccgttattccgataacgaaagtcaactggctagtgttatggcgcacgaaatctcccacgtcacccaacgtcacctggcgcgagcgatggaagatcagcagcgcagcgcgccgctgacctgggtcggcgcgttaggttctattttactggcgatggccagtccgcaggcggggatggcggcgctgaccggtacactggcgggaacgcgtcaggggatgatcagtttcacccagcaaaatgaacaggaagcggaccgcattggtattcaggtgctgcaacgcagcggattcgatccgcaggcgatgccaaccttcctcgaaaaattactcgatcaggcgcgttactccagccgcccgccggaaattttattgactcacccgttgccggaaagtcgtctggcagatgcccgcaaccgtgctaatcagatgcgcccgatggtggtgcagagcagcgaagatttctatctggcgaaagcgcgcacactggggatgtataattccggacgtaaccagctcaccagtgatttgctggatgaatgggcgaaaggaaacgttcgtcagcaacgagcagcacaatatggtcgtgctttacaggcgatggaagccaataaatacgacgaggcgcgtaaaacgctgcaaccgttactggcggcagaacctggcaacgcatggtatctcgatctggctactgatatcgatcttgggcaaaacaaagccaatgaggcgatcaatcgtctgaaaaatgcccgcgatttacgcaccaatccggtgttgcagctcaacctggcgaacgcttatttgcaaggcggtcaaccacaagaagcggccaatattctgaatcgctacacctttaataataaagatgacagcaacggctgggatttgctggcacaggcggaagccgcgctaaataaccgcgatcaggagctggctgcgcgagcagaaggttatgcgctcgccggacgactcgatcaggccattagcctgttgagtagcgccagtagccaggtgaaattaggcagcctgcaacaagcgcgttacgatgcgcgcatcgaccagttgcgccagctgcaggaacgctttaagccttataccaagatgtaattcgcattaaaggaagaacaatgaccaaacaggtaaaaatctaccataacccacgctgtagtaagagccgggaaacgctgaacctgctgaaagaaaacggcgtggagccagaagtggtgctctaccttgagacacccgccgatgcggcaacgctgcgcgatttgctgaaaatactggggatgaatagcgcccgtgaattgatgcgccagaaagaggatctttataaagaactgaacctggctgacagtagccttagcgaagaggcgctgattcaggcaatggtggataatccgaagctgatggagcgcccgattgtggtcgcgaatggcaaagcgcggattggtcgtccaccggagcaggtactggaaatcgtgggttaagatgtgctccatcgctagttgaagcacattgccggatgcgacgcttgccacgtcttatccggcctacgaatactatggattaacttcgcgtagttcggataaggcgttcgcgccgcatccgacaataaacaccttatttacaacttcagaatttctttcacaaacggaatggtcagcttacgttgcgcggtaatgctcgcacgatccaactgatccaacgtcataaatagcgtgcgcatttctctgtcgagccgcttcagcaagaaacgccccacatcttccggcagttcaaaaccacgcaaacgcgcgcgtaactgtagcgcctgcaacttatcttcatcagaaagtggctgcaatttgtagatctgcccccagtcgagtcggctcgcgagatccggtaatcccagattcaactgccgcggtggacgatcgccggtgatcaacaaccgtgttttgccgctttccagaattcgattgtagagatcgaaaatcgccatctcccacaactcatcgcctgcaatacactcaatgttgtcgatacagaccaggctcaaatgctccataccgtcgagcacttccggaacaaaccaggtgcgtttatccagcgggacatagcccaccgcatcgccacgctggctcaattccgcgcaagccgcgtgcagcagatggctgcgccccgcgccttcgcgtgcccagagatagatgtaaccgctatgttcctgacgcagcacgttttgcagcgcggccagtaaagaggagttatcccccggccagaaacttgcaaaggtttcgtcgtcaggaagataaagtggcaaagagagctgtgccggtgtgttcagagatacctcaaccaggatttcacaaaatcggctgaagtttaccacagaatcccatgatgtttgaaccgggcagcaacactgcccggtcggtacattatttgtctgttatatccgcgtcttctgcgtccagcaccacttcttcagggcgcagcacactgatcagtttgaagatcaaacttaagccgataccgacgatggtcgccagcgccataccttttaactccgccgcgccgatgtttaccttcgcgccactgacgccgatgatcaaaatcacggaagtcaggatcaggttctgtgctttgttgtaatccactttgctttcgatcaaaacacgaataccggaagcaccgatgacaccataaagcagcaggctaacgccgcccatcaccggcaatgggatcatctggatagcggcagccagtttaccgacgcaggaaagcaggatagcgaaaatcgccgccccgccgataacccaggtactgtaaacacgggtgatcgccatcacgccaatgttttctccgtaagtagtatttggcgtagagccaaagaagccggaaatcacggtgctcaagccattagcaaacatgctacggtgcagacctggatcgcgcagcagatcttttttgacgatattagccgttactaccaggtgccctacgtgttcggcaataaccactaacgccgctggcagaatagtcagaatggcaaaccactcgaagcgcggcgtatagagggttggcagcgcaaaccagtgagcattaataatcggcgtggtatcgacaattcccattgcgaaagagagcgcgtaccccaccagcacgccaattaaaatcgggataattgccaggaaaccacgaaacagcacggaacctaaaaccgtgaccgccagggtggtaatagagatgatgatggttttggagtctggcgtttgcccttcagccgggagtaaacccgccataccggcagctacgcccgccagctccagaccgatgacggcaacgattgcgcccattgccgcaggtggaaacagcacgtccagccagccggtccccgctttcttcacgataaaagaaaccaggcagaacagcacgccgcacataataaagccgcccagcgcgacttcataccctaacggcaacagtaacaataccggactaataaaggcaaagctggaaccaagataagccggaattttccctttacagatgaagagatacagcagcgttccaataccgttaaataacagtacagtcgccgggttaatatgaaataagacgggcaccaggacggttgcaccaaacatggcgaacaaatgttgcaaactaagcgggattgtctgtaaaagtggcggtctttcactcaccccgatagcacggcgcgtcatagtattatcctctgtattatgtgttataggcgctttactcaaaaaaaagccgactcttaaagtcggctttaattatttttattctttatttcgtaccaaagattttgtcaccggcatcgccgaggcccggaataatgtatccgtgctcgttcagtccctgatcaatgcttgcggtatacagttcgacgtccgggtgcgctttttccagcgcagcgataccttctggcgcagctaccagcaccagaactttgatgctgctgcagcccgcttttttcagcaggtcgatggtcgcgataacggaaccaccggttgccagcattgggtcaacgatcagcgccatacgctcatcgatgttagaaaccagtttctggaagtacggtaccggctccagcgtttcttcattacggtacataccgacaacgctgatgcgcgcgctcggaacgttttccagcacaccgtccatcataccaagacccgcacgcagaattggcacaacggtaattttcttacctttgatctggtcgatttctaccgggccgttccagccttcgatagttactttttccgtttcgaggtcggcggtcgcttcgtaagtcagcaggctacccacttcggaagcgagttcgcgaaagcgcttggtgctgatatcttgctcacgcatcagtcccagcttgtgtttgacgagtgggtgtttgacttccacgatcttcatactctttctcctttgaggggcagccacaaaaaaaatcgacggattatacctcctttcttcaaggcggcaatattcttttcgttgactttagtcaaaatgataacggtttgagataaagttattttatattcagatggttatgaaagaagattattccatccgaaaactaacctttaccctggcacaagtcttctttcgccgcgcgcctggggaaaagacgtgcaaaaaggttgtgtaaagcagtctcgcaaacgtttgctttccctgttagaattgcgccgaattttatttttctaccgcaagtaacgcgtggggacccaagcagtgaccgataaaacctctcttagctacaaagatgccggtgttgatattgacgcgggtaatgctctggttggaagaatcaaaggcgtagtgaagaaaacgcgtcgtccggaagtgatgggcggtctgggcggcttcggtgcgctgtgtgcattgccgcaaaaatatcgtgaacccgtgctggtttctggcactgacggcgtaggtaccaagctgcgtctggcaatggacttaaaacgtcacgacaccattggtattgatctggtcgccatgtgcgttaatgacctggtggtgcaaggtgcagagccgctgtttttcctcgactattacgcaaccggaaaactggatgttgataccgctagtgcggtgatcagcggcattgcggaaggttgtctgcaaagtggctgtagtctggtgggtggcgaaacggcagaaatgccggggatgtatcacggtgaggattacgatgtcgcgggtttctgcgttggcgtggtagaaaaaagtgaaatcatcgacggctctaaagtcagcgacggcgatgtgctgattgcactcggttccagcggtccacacagcaacggctatagcctggtgcgcaaaattcttgaagtcagcggttgtgatccgcaaaccaccgaacttgatggtaagccattagccgatcatctgctggcaccgacccgcatttacgtgaagagtgtgctggagttgattgaaaaggtcgatgtgcatgccattgcgcacctgaccggcggcggcttctgggaaaacattccgcgcgtattgccagataatactcaggcagtgattgatgaatcttcctggcagtggccggaagtgttcaactggctgcaaacggcaggtaacgttgagcaccatgaaatgtatcgcaccttcaactgcggcgtcgggatgattattgccctgcctgctccggaagtggacaaagccctcgccctgctcaatgccaacggtgaaaacgcgtggaaaatcggtatcatcaaagcctctgattccgaacaacgcgtggttatcgaataatgaatattgtggtgcttatttccggcaacggaagtaatttacaggcaattattgacgcctgtaaaaccaacaaaattaaaggcaccgtacgggcagttttcagcaataaggccgacgcgttcggccttgaacgcgcccgccaggcgggtattgcaacgcatacgctcatcgccagcgcgtttgacagtcgtgaagcctatgaccgggagttgattcatgaaatcgacatgtacgcacccgatgtggtcgtgctggctggttttatgcgcattctcagcccggcgtttgtctcccactatgccgggcgtttgctgaacattcacccttctctgctgccgaaatatcccggattacacacccatcgtcaggcgctggaaaatggcgatgaagagcacggtacaagcgtgcatttcgtcaccgatgaactggacggtggcccggttattttacaggcgaaagtcccggtatttgctggtgatagcgaagatgacatcaccgcccgcgtgcaaacccaggaacacgccatttatccactggtgattagctggtttgccgatggtcgtctgaaaatgcacgaaaacgccgcgtggctggatggtcaacgtctgccgccgcagggctacgctgccgacgagtaatacccccgtaattaaagcgccagctctgccgctggcgtttttcaattcacctgtaaatcgcaagctccagcagtttttttcccccttttctggcatagttggacatctgccaatattgctcgccataatatccaggcagtgtcccgtgaataaaacggagtaaaagtggtaatgggtcaggaaaagctatacatcgaaaaagagctcagttggttaagcttcaatgaacgcgtgcttcaggaagcggcggacaaatctaacccgctgattgaaaggatgcgtttcctggggatctattccaataaccttgatgagttctataaagtccgcttcgctgaactgaagcgacgcatcattattagcgaagaacaaggctccaactctcattcccgccatttactgggcaaaattcagtcccgggtgctgaaagccgatcaggaattcgacggcctctacaacgagctattgctggagatggcgcgcaaccagatcttcctgattaatgaacgccagctctccgtcaatcaacaaaactggctgcgtcattattttaagcagtatctgcgtcagcacattacgccgattttaatcaatcctgacactgacttagtgcagttcctgaaagatgattacacctatctggcggtggaaattatccgtggcgataccatccgttacgcgctgctggagatcccaagtgataaagtgccgcgctttgtgaatttaccgccagaagcgccgcgtcgacgcaagccgatgattcttctggataacattctgcgttactgccttgatgatattttcaaaggcttctttgattatgacgcgctgaatgcctatagtatgaagatgacccgcgatgccgaatacgatttagtgcatgagatggaagccagcctgatggagttgatgtcttccagtctcaagcagcgtttaactgctgagccggtgcgttttgtttatcagcgcgatatgcccaatgcgctggttgaagtgttacgcgaaaaactgactatttcccgctacgactccatcgtccccggcggtcgttatcataattttaaagactttattaatttccccaatgtcggcaaagccaatctggtgaacaaaccactgccgcgtttacgccatatttggtttgataaagcccagttccgcaatggttttgatgccattcgcgaacgcgatgtgttgctctattatccttatcacacctttgagcatgtgctggaactgctgcgtcaggctagcttcgacccgagcgtactggcgattaaaattaacatttaccgcgtggcgaaagatagtcgcatcatcgacagcatgatccacgccgcacataacggtaagaaagtcaccgtggtggttgagttacaggcgcgtttcgacgaagaagccaacattcactgggcgaagcgcctgaccgaagcaggcgtgcacgttatcttctctgcgccggggctgaaaattcacgccaaactgttcctgattagtcgtaaagaaaacggtgaagtggtgcgttatgcacacatcgggaccgggaactttaacgaaaaaaccgcgcgtctttatactgactatagcttgctgaccgccgatgcgcgcatcaccaacgaagtacggcgggtatttaactttattgaaaacccataccgtccggtgacatttgattatttaatggtaagcccgcaaaactcccgccgcctattgtatgaaatggtggaccgcgagatcgccaacgcgcagcaagggctgcccagtggtatcaccctgaagctaaataaccttgtcgataaaggcctggttgatcgtctgtatgcggcctccagctccggcgtaccggttaatctgctggttcgcggaatgtgtagcctgatccccaatctggaaggcattagcgacaacattcgtgccatcagtattgttgaccgttaccttgaacatgaccgggtttatatttttgaaaatggcggcgataaaaaggtctacctttcttccgccgactggatgacgcgcaatattgattatcgtattgaagtggcgacgccgctgctcgatccgcgcctgaagcagcgggtactggacatcatcgacatattgttcagcgatacggtcaaagcacgttatatcgataaagaactcagtaatcgctacgttccccgcggcaatcgccgcaaagtacgggcgcagttggcgatttatgactacatcaaaagtctcgaacaacctgaataaccctatgccaatacacgataaatcccctcgtccgcaggagtttgctgcggtcgatcttggtagtaacagttttcacatggtcatagcccgtgtggtagatggtgccatgcagattattggccgcctgaaacagcgggtgcatctggcggacggcctggggccagataatatgttgagtgaagaggcaatgacgcgcggtttaaactgtctgagcctgtttgccgaacggctacaagggttttctcctgccagcgtctgtatagttggtacccatacgctgcgtcaggcgctgaacgccactgactttctgaaacgcgcggaaaaggtcattccctacccgattgaaattatttccggtaatgaagaagcccgtctgatttttatgggcgtggaacatacccaaccggaaaaaggtcgcaaactggttattgatattggcggcggatctacggaactggtgattggtgaaaatttcgaacctattctcgttgaaagccgccggatgggttgtgtcagctttgcccagctttattttcctggcggggtcatcaataaagagaattttcagcgcgctcgcatggcggcagcacaaaaactggaaactttaacctggcaattccgtattcagggctggaacgttgcaatgggcgcttccggtaccataaaagccgcccatgaagtgttaatggaaatgggcgagaaagacgggataattaccccggaacgtctggaaaaactggtaaaagaagttttacgtcaccgtaatttcgcaagcctgagtttaccgggtctttccgaagagcggaaaacagtcttcgttccgggactggcgattttatgcggtgtgtttgatgctttagccatccgtgaactgcgcctttctgacggggcgttacgcgaaggcgtactgtatgaaatggaaggacgtttccgtcatcaggatgtgcgtagtcgcaccgccagcagcctcgccaaccagtatcacatcgacagcgaacaggcccgacgggtgctggataccactatgcaaatgtacgaacagtggcgggaacagcaaccgaagctggcgcatccgcaactggaggcgctactgcgatgggccgccatgctgcatgaggtcgggttgaatatcaaccacagcggtttgcatcgccactccgcttatattctgcaaaacagtgacttgccgggttttaatcaggaacagcagctgatgatggcgacactggtgcgctatcaccgtaaagcgattaagctcgacgatctaccgcgctttaccttgtttaagaagaaacagttcctgccactgatacagctattgcgccttggcgtattactcaacaatcaacgtcaggcaaccaccacaccgccaacattgacgctgattactgatgacagtcactggacactgcgtttcccgcatgactggtttagtcagaatgcgctggtactgcttgatctggaaaaggagcaagaatactgggaaggcgtggctggctggcggttgaaaattgaagaagaaagtacaccagaaatcgccgcttaatactttgcgggccgacgagaaatgtcggcccgcattattcaggcactttcgcgaatgggttcgatttcattcagcgtatcaattaacggctgcggcttaccaataagataaccctgcatataatcgatccccaaagagagcaccgcctcgcggatctcttcgttttcaacgtactctgccactaccagcattttcttcattcgcgccaggtggcaaatgcttgccactatctgataatccagactattactcacaatattgcggataaaactgccgtcaattttaagcagatcggcattcacatttttaagccgcgcatagctggcgtagccggtgccgaaatcatcaatcgcaatctggcagcctaattcctgaagatgctgcaaggtgatttgcgcctgcttaacattggtcagagcattactttcggtgacttcaaaaataagttgccacgcttcaatctgatatttagccagcaactgactgacttcaacaggaaaacgagcctgacatacgctggttggagacagattaatagcaaaacggtgagcgggcatcttcgctctgttttcagccataaattgcagcgtatgctcaatgacccacatgtcgatactgctgcttaaaccaaattcgtgcgcgaccggcaagaagctatcggggctgatcagttcatcattctcacctttcatgcgcagaagaatttcatggtaaacatcaccacgcataccggtaatcggctgggccatcaggaaaaaatggttgtgttccagcgcctgctgtagtcgattcatcatcgcgactttatctttcaattcgcgttgcaaatacattgccccgcgacgctgcatattttccggggcgttggtcacgatggaaagttcggcgaccgtatttagctctcccagcagcaggtagatatgattcactgggctgcgcacatagcagtaactgacgccaatctgcggttgcatcggcatgccatcccaaaagaaacgaaattgcttgagatggctatccagtgcggtaatgcgctcctggtggctttctgtattcagtcgcagcgcgagatcgttaccgctaagctgataaacatcttcacccggttccagcaagggactcagccagtgagaaagtttttgcttgtattgaatccgcagcatgatgccatagttcttaaccagcatttccatgccagggatgcgtaaataacaaagcgcagaccagggggcatcacgcaacgcgcgattcagggcgcgaacatttggcagatgaaccaccgggtccacatacgcaagccgctgaatgcgtctgactaccgctctctgacgggttgccagtacagccatataattgacaataaaagagaataccagataactggaggaggttatggtcagctgcgtggtatagccaggataaatgggaatgtaattttgatagctgtggatgctgatcatcaacacgaccgcccagagcaggctaatcagcttataaccatagcgcatcgctccccacatcatcaggggcagcaataaactcaaggtataattggtgctaaaaattgtgcttttttcatttaacggcatgcataacagcaacaataaagcacctaatgccagtagccagagcgcgaactcttttttggtgactttggcatcaacctgctgttttaattggctataatagctacgtaaataaaatggatttcgcactacccgaatgatgaagtagcacagcgggacaccgatcagattacccaccagtaaggcctgataattgattaaagtcccgaggttaaaaggcatgacaccgaccagattttctctgctcgccagtaatcctacaaatgcagcaaactggaaaagtatcagaaacagcgttgcaggaaacacaatctgccagaatatacgctgggaaattaaacgggtatcaccatgactaacgttgttacgccggggagtaaagaccctgtaaccgccccaacagagaatgataatgataataaaattagccgttaaacttagcgtttcgtaaaaacccagctctgcatatttgcggacaaaaatccctaaggcgatccctggcaatgccgcccagctgaaaaacatcatcatgctgatcatcagtgccagaggcagataaaagagaaaaacctcaccggaagaaatatgcgcgaaagtattaatgtgggcgaaaatgggcaagattaaagaaggcaggaacagcggaagcccccaccatttatcacgtatttttatataagttgcattcagtttcatagatgctcagcagaatcccccacatcctgaaggaggtgtattcagacaggcatcccacctgacttcgaatgatgattattcatcactatagagagcattgattctaagtgtcatatgaaagtaccaattgatatatatcaaacaaaataaccctgattaatgaattattacgtttatcatgttaattcatcattattacatcatcattgtaaataattaaattaacttccataacattaaaatatgtatccactgacgcttttttacataacgaagaattgaccattttgtcctgttgtgccttaatgtaagtaccgtccacagcgtgggacatacttcaaggaaccttttgtgagtcaggcaaccagtatgcgaaaacgacaccgatttaacagtcgcatgacccgtatcgtactgctcatcagctttatcttcttctttggccgttttatctacagctccgtcggtgcctggcagcaccatcagagcaaaaaagaagctcagcaatccacactctccgtcgaaagtccggtacaacgttaacggttaccttctccactttcacagaacataacggcacttcgctgtcggatgcttttgctgtttgggattatcaaagcggcagatattctttcatcttaaattttacgtctttatcctgactgatgtttatcctgtttggctgcgaaataaatataaaattaatatatatgttgtaatgatatatttttataaattattccctgcgtgaattttaataaatttaatctatccctttatacgcaatacatttactttcctcttttgatgatcttaaatgtcttatttttcgtaatgtgtataacaaggaatagtgatgaaatttaaaaaatgtcttctgcctgtggcaatgttagcgagtttcactctggcaggatgccagagtaatgctgacgatcatgctgccgatgtttatcaaaccgatcaactgaataccaaacaagaaactaaaaccgttaatattatttccattcttcccgcaaaagttgccgtagacaactcccaaaataaacggaacgcacaagccttcggcgcgcttattggcgcagtcgctggcggtgttatcggccacaacgtcgggtctggcagcaattccggaacgacggcaggtgcagttggcggcggagctgtaggcgcggcagcgggttctatggtgaatgataaaaccttagtggaaggtgtttctttaacctataaggaaggcaccaaagtgtatacctctacccaggtgggtaaagagtgccagtttacgacaggtttagccgttgttattaccacgacgtataacgaaacgcgtattcagccaaataccaaatgtcctgaaaagagctaataatcaggaggagtcatgaagaaagtttttctttgcgccatcttagcctccttaagctatccggctatcgccagtagtttgcaggatcaactctctgctgtcgcagaagcggaacagcaaggtaaaaatgaagagcaaaggcagcatgacgaatgggtcgcggagcgcaacagggaaatccagcaagagaagcaacgtcgcgcaaatgcccaggccgccgctaacaaaagagcggcaacggcagcggcaaataagaaagctcgtcaggataaactggacgccgaagcctctgcggacaaaaaacgcgatcaaagttatgaagatgagctacgcagcttagagattcagaaacaaaaactggcgctggcgaaagaagaagcccgcgttaagcgagaaaacgaatttatcgatcaggaactgaagcacaaagctgcgcaaaccgatgtggtgcaatctgaagctgacgccaacagaaatatgactgaaggcggtcgcgatctgatgaaaagcgtgggcaaagcagaagagaacaaaagcgacagctggtttaattaatcgatgttagtaacttcaatcctataattcttgaagataaaaaaccctctgtagtaacagagggttttgttcattcatagtgcagggtcaaatcattcccactcaatggtagctggcggcttgccgctgatgtcatacaccacgcgggaaataccgttcacttcattgataatgcggttggaaacgcgaccgaggaaatcgtacggcagatgcgcccagtgtgcggtcataaagtcgatggtttcgacagcacgcagagagacaacccagtcatacttacgaccatcgcccattacgccaacggaacgtaccggcaggaacacagtgaacgcctggctgactttgtcgtacaggtccgctttacgcagttcttcaatgaagatggcgtcagcacggcgcagcaggtcacagtactctttcttcacttcacccagaacacgaacgccaaggcctggtcccgggaacgggtgacggtacagcatgtcgtacggcaggcccagctccagaccaatcttacgcacttcgtctttgaacagctctttcagcggttcaaccaggcccatcttcatctctttcggcaggccgcccacgttgtggtgagatttgatgacgtgtgctttaccggttgcagacgccgcagattcgataacgtcagggtagatggtgccctgcgccagccacttcacgtcttccagtttcagcgcttcttcatcgaatacttcaacgaaaacgcgaccgatgattttacgttttgcttccggatcgttttcgccagccagcgcactcaggaagcgatcttctgccggtacgtgaacaatgttaagaccaaagtgatcgccaaacatatccagaacctgctctgcttcgttgaggcgcagcaggccgttgtcgacgaatacgcaagtcaggtttttaccgatagcgcggtgcagcagcattgcggttacggaggaatccacaccaccagagaggccgaggatgactttatcgtcgcctacctgctcgcggatgcgagctacagcatcgtcgataattttcgctggcgtccacagggcttcacactggcagatatcacgcacaaaacgctccagcatgcgcataccctggcgggtatgagtcacttccgggtggaactgtacgccatagaagcgtttttcttcgttagccataatggcaaacgggcagctttcggtgctggctacggtgatgaagtcggacggaatagcggtaactttatcgccgtggctcatccagacatcgagcagcggtttaccgtctgcggtcagcgcatcttcgataccgcgaaccagtgcgctgtcgtttacgacttcaacctgcgcgtagccaaattcacgttcgttagaggcttcaacgtgaccgcccaactgcattgccatggtctgcatgccatagcaaacgccgaataccggtacgcctgcttcaaagacatactgcggcgcacgcggactgttttcttcagtagtactttccgggccgccggaaagaataatgccgcttggattgaagtcacgaatttgtgcttctgtcacatcccacgcccacagttcgcagtaaacacccagctcacgcacgcggcgcgcaaccagttgagtgtactgagaaccgaagtccagaatgaggatgcgatgcttatgaatgttttccgtcattgacgcttattccgaggcaagtgaaacagataatataaatcgcccgacatgaagtcgggcgaagagaatcaggagcccagacggtagttcggggactctttagtaatggtcacgtcgtgaacgtggctttcctgaatgcccgcaccgctgatacgtacaaactccgctttagtacgcagttcgtcgatagtaccacagccggtcagacccatacaggagcgcaggccgcccatctgctggtgaatgatctctttcaggcgacctttataggctacgcgaccttcgataccttccggcaccagtttgtcggcagcgttatcgctctggaaataacggtcagaggaacctttggacatcgcgcccagggaacccataccacggtaagatttgtaagaacggccctggtagagttcgatttcacccggagattcttcagtacccgccagcatggaacctaccatcaccgcgcttgcgccagcggcgatagctttggcgatgtcgccggagaagcgaataccgccatcagcgataaccggaataccggtgccttccagggcttctactgcgtcagcaacagcggtaatctgcggaacaccgacgccagtcacgatacgagttgtacagatagagccagggccaatgccgactttaaccgcactgcaaccagcttctgccagagcgcgtgcacctgcagctgttgccacgttgccgccgataatttgcagatccggatatttagcacgggtttcacggatacgttgcagtacaccttcactgtgaccgtgggaggagtcgatcagcagaacgtcaacgcctgcggcaaccagcgcgtcaacacgctcttcgttacccgcacctgcgccaaccgctgcaccaacacgcagacggccttgctcgtctttacaggcgttcggtttacgttccgctttctggaagtctttcacggtgatcatgccgatcaggtggaattcgtcatcaaccaccagcgctttttcaacgcgtttttcgtgcatttttgccagcaccacttcacgggcttcaccttcacgcacggtgaccagacgctctttcggcgtcatgtaaacgctaaccggctggttcaggtcggtaacaaaacgcacgtcacgaccggtgataatacccaccagttcgttttcttcggtaacgaccggatagcccgcaaaaccgttacgctcggtcagttctttcacttcgcgcagcgtcgtggttggcagaacagtctgcggatcagtcaccacaccagattcgtgttttttcacacggcgaacttcttctgcctggcgttcaatggacatgtttttgtggataaagccgataccgccttcctgagccagagcaatagccaggcgcgcttccgttacggtatccattgctgcggaaagcatagggatattcagacgaatagttttcgtcagctgggtgctgaggtcagcagtattcggcagaacggtagagtgagcaggaacgaggagaacgtcgtcaaacgtcagagcttctttagcgatacgtagcatgggcaatatctcgaccagagtggttaataaatattgccgcggcattatacagagcgtaaccgattgcatctacccctttttgcaaaaaatgcttgctatccccgaagggcgggttactatcgactgaataacctgctgatttagaatttgatctcgctcacatgttaccttctcaatcccctgcaatttttaccgttagtcgcctgaatcaaacggttcgtctgctgcttgagcatgagatgggacaggtttggatcagcggcgaaatttctaatttcacgcaaccagcttccggtcactggtactttacactcaaagacgacaccgcccaggtacgctgcgcgatgttccgcaacagcaaccgccgggtgaccttccgcccacagcatgggcaacaagttttagttcgcgccaatattacgctctacgagccgcgcggcgactaccagataatcgttgagagtatgcagccggccggtgaagggctgctgcaacagaagtacgaacagctcaaagcgaagttgcaggctgaaggtttgttcgatcagcaatacaaaaaaccacttccctcccctgcgcattgcgttggtgtgatcaccagtaaaaccggtgctgcgctacatgatattttgcatgtgttaaaacgtcgcgatccttctctgccggtgatcatctaccctgccgccgttcagggcgatgacgcgccggggcaaattgttcgcgccattgaactggcgaatcagcgcaatgagtgcgacgtattgatcgtcgggcgcggcggcggtagcctggaagatttatggagttttaacgacgaacgcgtagcgcgggcgatttttaccagccgcattccggttgtcagcgccgtcgggcatgagacggatgtgaccattgccgattttgttgccgatctgcgtgcgccaacgccgtctgccgccgctgaagtagtgagccgtaatcagcaagagttactgcgccaggtgcaaagcacccgtcaacggctggagatggcgatggattattatctcgccaaccgcacacgtcgctttacgcaaattcatcaccgattacagcaacagcatccgcagctccggctggcacgccagcaaaccatgcttgagcgcctgcaaaagcgaatgagctttgcgctggaaaatcaacttaagcgtaccgggcaacagcagcagcggttaacacagcggctgaatcagcaaaatccacagccgaagattcatcgcgcgcaaacgcgcattcagcaactggaatatcgtttagcagaaaccctgcgcgcacagcttagcgccacgcgtgaacgtttcggtaatgcagtaacgcacctcgaagccgtaagcccactgagtacgctggcgcgtggatacagcgttactactgctactgacggcaatgtactgaaaaaagtgaagcaagttaaagcgggtgaaatgctaaccacacgtctggaagacggctggatagaaagtgaagtaaaaaacatccagccagtaaaaaaaagccgtaaaaaggtgcattaagccagcacgaattcaacgcgttttttgcttatcaagccatgcccgtgctgacagaagtaatctactgcaccacaggcttttaacacctgcaacggttgatggcagtctggacaaagagctttcatttcaataaattccccgcaggatcggcaacgcgcatggccgttatcctgatcaagcacatgctgacattgtggacaatgcagttccatatgaattcctccggtagccattccctctacattcatagagggaatggcagataaaatacttacggataattatttatttttcttgatgtgcttcatcagacgcttacgtttacgcatctgggttggcgtcagggtgttacgcttattcgcatacgggttttccccttctttgaactgaatacgaatcgggcttcccattacgtccaggcttttgcggaagtagttcatcaagtagcgcttgtaggaatcaggcaggtctttcacctgattaccgtgaatcaccacaatcggcgggttataaccaccggcgtgggcatatttcagcttcacacgacgaccgcgtaccagcggcggttggtgatcttcaacagccatcgtcatgatgcgcgtcagcatagaggtccccacacgacgggtggagctgtcatacgcttcacgtacactttcaaacaagttaccaacaccactgccgtgcaaggcagagataaagtgcacacgagcaaaatcgataaagcccagacggaagtccagcgtttctttcacctgctctttcacttcctgactcaggccatcccacttattcaccacaatgacaagactgcgcccactattgagaataaagcccagcaggctgagatcctgatcggaaataccttcgcgcgcatcaatcactaacatcaccacgttggcgtcttcaatggcctgcaacgttttgattacggagaatttctctacagcatcggtgattttgccgcgtttacgtacgccagcggtgtcaatgagcacatactcacgtccatcgcgttccattgggatgtagatgctgtcacgcgtcgtgccaggcatgtcgtaaacaacaacgcgctcttcaccaagaatacggttagtgagtgtagacttacctacgttcggacgacccacaatcgccagtttgatcggcagactttgcgggtcgaagtcgtcttcctcttcttcttcgccgttctcttccgcttcaaattgcgcccagtattcagcgtcttcgtcgacttcctcttgcggtgcgagatcttccatccacggcagcagcacatgctccagcagacttaatacgccacgaccgtgagacgcggcgatcgggtagatttcacctaaaccaaggctgtagaaatcaaccactgcctgatcgggatccagaccgtcagttttgtttgccaccaggaaggtcggtttttcacgggagcgcagatgtttggcaatcgcttcatctgccggcatcaggcccgcgcgcgcatccaccataaacagtacgacgtccgcttcttcaatcgccagcaggctctgttccgccatgcgggtttctacaccgtcttctgtgccatcaatcccgccggtatcaatacagataaactcacggccttcaatttccgcacgaccgtacttacggtcacgagtcagacccgggaaatccgcaaccagcgcatctcgggtgcgagttagacggttaaataacgtggattttcctacgttagggcgcccgacaagcgcgaccacaggtaccatgtttaaagcctcatttttataaatcatcagacaacgcacgctatattcgcgtcgttgttaaaaacaggaaaacggcccctgtccaggagccgttttcaaagtgaacgacagagacgattaacgtgtaatagagtacacggttccgtcttttgcctggatcagcagtttgccgtcagcggcaaccggttcagtctggaaaccggaactatcaactttttgctgggcaacgaaacgaccatcttcgacgttaatccagtgcagataaccttcactgtcaccgaccaccaggttgccattatacagcaccggagaagtcagcaggcgatgcagcagatcgctttgtgtccacagcgtaacgccgccatcaatggtcaacgccatcacccggtcattttgatcgaccagatagatgcgattgccgtcgacgatgaaatcattcacgctacccagttcgcgtttccacataatctgaccactgcgcagatcaagcgccgtcaggttaccattataggccagcgcgaaaacaacgccgttaacaacgacgggagtcgtgtcaacatcgctcagacggtcaatttcggtagaaccggtcgcctgggaaatacgctgctgccaaatcatctggccctgttccatcagcactgcgctgacgcgaccattatcgccccccacgacggccgcaccaaaagccgttgtcggcgcagactcgccacgcaaagagaggctaggcatatcgaggttaactgtccatttgacagcgccgtcagcttcgttcagcgcttgtaactgaccgttactggtgtggattaacaccagaccgtcgctgaccaccgggcggctaagtgcttcacccgcgactttagtttgccatgccacagtaccatcgctggtattcagcgcgtaaacctgcgccttttcgctgccaatgtagacatgcccaccagacacggtcacaccgccagaaagtaatgcaggctctttagagaaccagccatctttctcggccaggctgacagaccagatttctttgccatcatccgcattcagcgcttttactaaaccagcgcggtccgctgcatagacaacgttgtccgccagtgccggatgaagattggaatagaagttgccaatgccgctaccaacggaagtgctccacgccgtggtcggcgtaaactggttttcaacggttggcaatggggacatctttaccacatcttcttcgctgttaaacaggctacagccgcttaaaagggtaacggaaagcagtcctggcagcagtaatttacgcaattgcatcgggtccctctcagatggacaaattattaattttcatctgcatcatttcgctcagtgccggagtaacatcgcttttcacgcctgcttcccatgcactacgcgcaccttgcttatcacctttgctcagcaatgcttcaccacgcaggtcggcaacaatggcagcccacccttcacctttgatggtatcaagggttttcagcgcggcatcagcctgcttgagctgtacctgaacgcgagcaagacgcagatttatcacggctttgagattttcatcgctcgtgtctgccagcccctgttgtaactgggcggcagctttctctagttcatttttgtcaacaaattgctgcgcaagttccaaagaagccagcgcaccataagtatttttattttcagcagcaaatttttccgccgccgggatgctatccggtttgccttcgctcactgcggtaaccgcattttgataggcaagagaagcggagcgtgcagaatcaacctgatggctgttccagtagcgccagccaatcagtgcgccaacgcccaaaatcaccccaacagccagtgctttgccattttcagcaaaaaagcgtttaaccgcttctacctggtcgttttcgttctcgtaaatttccacgctgtccttctccttccttaacccagtaacgtgcgcaaatgcgcggctacgctatcctgcgcaactgccgtttgctcaccagagcgcaaatccttcactactgctgtgccgttagccacttcagactcacccagcaccacagcaacgcgggcaccccatttatcagcacgggcaaactgtttcttaaagttgccgccgccgtggttggtcatcaatttcacgcccggtaattcatcacgcagacgctcagctaatgccatagccgcagattgtgtatcagcaccactagccaccaggtatatatcgacaacaggatcggctttaaattccggattaacggcctgtactaacaatacaagacgttcgaggcccatagcaaaaccgacagccggtgttgcacgaccgcccagttgttccacaagaccgtcataacgaccgcctgcacacacggtgccctgggagccgagactgttagtcacccactcgaaaacggtacggttgtagtaatccagaccacgcaccagacgctggtttacggtgtaagcgatccccgcgctctccagcagtttgcacagaccggcaaaatgctcacgagattcctcgtccagatagtcacctaatgccggagcgtcgttgagaagcgcctgcacttccggatttttactatccagcacgcgcagcgggttagtgtacatgcggcgtttgcagtcttcgtccagcttttctttatgctgctcaaggaatgccaccagcgcatcgcggtaattggcgcgtgcttccaggctaccgatagagttcagctcaagagttacgtgctcggaaatacccagcgcgcgccaccagcgggcagtgagcataatcagttcagcgtcgatatccggaccttgcagaccgaaaacttcgcagcccaactgatggaactgacgataacgccctttctgcggacgctcgtgacggaacatcggcccgatataccacagacgctgttcctgattgtacagaagaccatgctcgatgccggcgcgtacacagcccgccgtcccttcagggcgcagagtcaggctgtcgccattgcgatcctcaaaggtgtacatctctttttcaaccacgtcggtgacttcaccaatcgcacgtttgaatagcggggtctgctctacaatcggcaagcggatttcactgtaaccgtagctgccgagcacgtttttcagtgtgccttcaatgcgctgccagatggccgtttcgccaggcaggtaatcgttcatgccgcgaatggcttgaatgttttttgccacgtttattctctttctgaatataaaaatgaaccctcaacgcttccctcaatgtttcgggagccatgcgggttcaatcatacacgggaagcgaggcgcttcccatcacgttattatttttcaacctgctgaacgtcaattcgacgcgcttcgtccagctgactggctttcgcacgaatgcgtgcttccagctggtcgatcatatcgttgttgtccagacggtctttgcgcacgccatcttcatagaggccgcttttcttgttgccgccggtgacgccgagtgtagaaaccagcgcctcacctgggccattcaccacgcagccgataatgctaacgtccatcggagtgatgatatcttccaggcgttgctccagcgcgttaaccgtaccgataacatcaaattcctgacggctacaggtcgggcaggcgatgaagttgatccctcggctacggatacgcaggcttttcaaaatatcgaaaccgactttgatctcttcgaccggatcggccgccaggcttacgcgcagcgtgtcgccgatgccttcagacagcagcagacctaaaccaatggcggattttactgccccgctgcgcgcaccaccggcttcggtgatccccagatgcaacggctgatcgatctgttttgccagcaaacgataagactcaacagcgaggaagacgtcagacgctttcacgctgactttgaactgatcgaagttcaggcgatcgagatgatcaacatgacgcatggcagattccagcaacgcctgcggcgtcggttcgccatacttttcttgcagatctttttccaggcttccggcgttaacgccaatacggatcggaatgtttttatcgcgcgcacagtcaaccaccatgcgaatacgctcttcattaccgatattgccagggttaatacgcagacaatcgacgccgtattccgctactttcagcgcaatgcgatagtcgaagtggatgtcagccaccagcggcacgttaacctgctgtttgatgagtttgaacgcttctgccgcgtccatcgtcggtacggatacacggacgatatcagcgccaacgcgttccagcgccttgatttgattgaccgttgcttcgacgtctgtcgtacgcgtattggtcatggactgtacggcgatgggagcaccatcgccaatcggcacattcccaacgtaaatacgtgtactttttctacgttgaattggagcctggttatgcatgaaaaatctcccgcgttacccgtctgttactgcgccggactttgttcggcattgagggtcagacgcgcaacctggttagttctgataaaacgactcagatcgacaggtttcccttgatactggatctgtactgcggctggcgcaccaattttcagtttgtacggtgcctggccggttaagttcaaattaccgtctttacgctgcataccgctaaacaattttttaccggtagcatcagtgacctccagccagcaatcggcagtaaagttcatcaccagcgcattcggatcagccaccggcgtggtcacgccagcctgatcggttggcaacggcgcagcaccatctggcgttgttgctgccgttggtgccggggtcgcggcggtatcaacatttgcctggctagggctaacaaccgcattctgttgcggatcaacagctggtgctggcgcagttacggcaggtgtttgcgtgttggttgcggtagtatccacagacgctggcggcgtggacgttgtagccgggtctgtagttgtgctcgtatttaatggaacactctgcccctgctcgctattactgctcagttccgcgctagattgatcggccatagtggtgatctcttcctgctgagctttgcggtcttgccaccaccaggcaccgctcaggccgataaccacaaacaacaccagccaagtgaaggtcatcagccagccgtcgcgttttttgcggcgtttaccgagggaaaaactctgcatcggcgcaacttttgcagcccgaagtggagcctgcttttccagccctggcagcagttcttcttctggaatatgtaccagacgcgcataagagcggatatatccgcgcaggaatgtactagcaagatcggcgggtgccttatcttcttcaatgtcgcgtaccgtggaaaccttcaggcaaagtcgctcggcaacggcctgctgactaagtcctagttgttcgcgagcattacgcaggcgagcgccggtagtaagtgcttcattttggtcgtgcgtggcttcagtattcattcgctgcaggtacgtttaaatgagaattgagatgccggtgaaccatcatgctcacccacaccgcgaaacatccgttaagttaaccgttatcatacagtataagaccgtctgtgtgctcgtgacaaagcccacattcactaaggctaacttactgttgcatcgttacatactgccttaaagtcagcaaaaacgcaccgttaatattgaccagacaattgcaacttaatacttcattcataaaacattacgccacggtacataaagtaaccgtggcgtaatggctatcagaccgctttaatgtcgatggcttcaccctgcatccgtttacgcagggtacgtttcgtacggtcgataacatcgcccgccaactgaccacaggcagcatcgatatcatcaccacgagttttacgcacaatagtggtgaaaccgtagctcatcagcactttactgaaacggtcgatacggctgttgctgctgcgtccatacggcgcacccgggaacgggttccacgggatcaggttgatcttacacggcgtatctttcagcagttccgccagttggtgcgcgtgttcagtgccgtcgttaacgtggtcaagcatcacgtattcaatagtgactcggccctgattggcgttggatttctccagataacggcgcaccgcagcaaggaacgtttcgatattgtactttttgttgatcggcacaatttcgtcacgaatttcgtcgttcggcgcgtgcagggaaattgccagtgcaacgtcgatcatatcgcccagtttatccagcgccggaactacaccggaagtggaaagcgtgacgcgacgtttagacaggccaaaaccgaaatcatcaagcatgatttccatcgccggaacgacgttgttcaggttgagcagcggctcgcccatgcccatcatcactacgttagtgatcggacgctgaccggtgacttttgctgcgccgacgattttcgccgcacgccacacctggccgataatttcgctcacccgcaggttgcggttaaagccctgctgggcggtggaacagaatttacactccagcgcacaccccacctggctagagacgcagagcgtggcacggtcgtcttccgggatatacaccgtttcgacgcgctgatcgccaacggcgatcgcccatttaatggtgccgtcagaactacgctgttcttcaaccacttccggtgcgcggatttccgccacctctttcagtttgccgcgcaacactttgttgatgtcggtcatctcatcaaagttgtcgcagcaatagtgatacatccacttcatcacctgatcggcgcggaagggtttttcacctaaatctttaaaaaactcccgcatctgctgacggttgagatccagcaggttgatttttccatctttcgtggtgacgttttcaggtgtgactaattgttcagacatatgctattccggcctcgttattacacgttatggcccctggagggttgaaaaaagaaacgccccggtgagcggctgctcgtccgggggcgctgcattgtacaaattctggcgcacggatgccacgtttgcacgcggcatttacgaaattattaacgggtgcgcgggcacacttcgccttcgccaaagaaataagcgatttcgcgagcggcagattcgacggaatcagaaccgtgggtaccgttttcggtcaggctgtcagcgtaatcagcgcgcagagtaccagccagtgcgtttgccggattggtcgcgcccagcagatcgcggtgacgctgaacggcgttttcaccttccagcacggaaaccacgatcgggccagaggtcatgaattcaaccagaccatcaaagaacggttttccatcgtgttcagcataaaagccacgtgcctgttcaacggtcaggtgcagcattttggtgccaacaattttgaaccctgcagcttcaaagcgcgcaaagatattaccaatgacgttttttgctaccgcgttcggtttgatgatggaaaaagtacgttcaatagccatttttacctctgtaaattgttctgttgttgtctgtaccagcgtacgagatggcgcggattataatgagcaacagggccgttgactattgatgaaggtaacatttttttaaaataaaatgagttttagcaacaatcagggacaaaacagattattgcatgacaaatttcactgtcgcgatttgccccacgtcatccatcaccagcaattgataatcacctttatccgtcaaatgcagggtcacgttgcgcccgcgttcagttaacggttcgccattcagaaaccaccagcgttcacctgcccctccactactttgcaacggcaaagtcgcttccgctgcgcccggtaaacgtttaataatcgcgccatcgcgaacgcctgtcagctgcagcgggagctgggcatcgtgaccgtatggcgggcaacttgtgctggccggtggtaagcgcacagcgcgacgttcacttgcgggcagccagggttccagcggtagcggccagacatttatcatttcttgtcgcgcttgcgggcaatcagcggcaacacgtttgccattttcatccagccagatggggaaacgaatgccattaatgccttcctgctccggcagtaatagagttggcggctgactcccgtccagcagccaggttgccaggcggcggcgacagttaccgtcaccttccggcaaagactgtccgcccggccagcagataacgccacgagtgacactgttcgggcgcgggtcttccggcagattcgcactgcggctcagtaagatattattgacctgattcaacaatggtacggcactggcaaagccaaactgaccaacaacgggcgtgccgtccggtctgccagtccagatcccaatgacatagcgagcgttaaccccaatcgcccaggcgtcacgatagccatagctggtgcccgttttccatgccagtggggcgacgcgcggcaaggcactatccggcaagggttgcgcttcatcagccataatccggcgaatgatccacgccgccccgctgctcattaaaggccgttcaagcagcggatcgtcaggctgtaagcgcaatttgcctgccttgccgtggcgagcaaacgcggtatacgctgccgccatatcttccagttttgcaccagcgccgccgagaatgagactaagattcggcgcagcaccgttgggcaaatataacggcaatccaacattgcgtaactttgccgcaaaccgtttcggtccataggcttccagcacctgcacagcaggtaagttcaggctgcgcaccagcgcctcgctcatgctgatcgggccatgaaaaccgctatcaaagttacctggtcgataatcaccggtgcgccgggggacgtcttgcagcagacttgccgggtggatcaagccttcatccagcgccagaccataaacaaacggtttgagcacacttcctgggcttcggatgctattgaccatatcaacatgaccaaagcgactatcatcgttgagatcaacgcttcccacccagccgcgaacacgcatatcggtatgatcaaccacgatcatcgccagactgctgcgcggtggcaaccgccctttccagttttgcgccagttcttccagacgtcgttgaagaccggcatccaacgtagtagtgattttgtcgcttttgcttttaccgagcatcatgcggctaaacagcggtgccagttgcggcatttgtcggggggccagccagatgggttcttccctactctcttttacctgctcacgggaccacacaccttgcacggccatccgttcgagcactttattacgcgcggcttcggcacgctccggccaacgatccgggcgaagacggctgggcgcttgcggcaaaaccgccagcattgccgcctcggaatagcttaaattcgcagggctttttccgagataagcccaacttgccgcaccgatcccctgcaacgtaccgccaaacggagcgcggttaagatacaaggtcagaatttcacgcttagacagatgccattccagttgcaacgcgcgccagagctggcgaattttgccgccaaatgttttggggtgaggatcaagcagacgagcaacctgcatagtgagcgtgctgccaccggaaataacccgtccgctagtgagatcttgccatgctgcgcgcgccacgctgaatggattcacccccggatgcttccagaaccagcgatcttcataattgatcagcgcttcaaggtaacgtggagaaacatcttcgattgttaccggataacgccagatgccgtcagcatcggcgaagcgccagagcggcgtaccatcctgcgccacgaccactcgtgcgggattgacttcatgcagcggtagaggccagagtttatctgctccccacgctgcaagaaaaaggagaaagggcgcggctgccaacgttatccagcagccgcgtttggttaacaagcgaggcatttacggtctgacaatcagcagatcttcagccgcgccggtcgcccgccattggggaacatacatactttccaccatcggttgcggtacctgatacgttcccggcgtcaccgcccgcgccagatacaccagcgttaccggttggtattcatcaacggcaaccgccgccacaaagcgatcgtcacggaactcaatgtgcttaatgctcgcctgctgcatctggttcagtaagttctgcacttcgccaccactttgctccaggctggcgctaccgttcgccagattctggttttccagttccagacccgcaggcagcagatccacgactaacgcatccggcacgctgttactggcttttacctgcaaccacaccagcaccagatcgccgctacgtaagctgtccaggcttttgctcttaccatcagtaccaagaatatgacgctcgatttgcagcacattgttcgccggtaaaggtgcggattgcggataaccgctggcatccatacgcaaccataacggctgatcgccactgttgctcacctgcaaggtgacaagttgatcgctattcagattgctgttttgcgctttctcgcctgtcagctgctcagcactgaaagaggtttgcgcctgccatttaccgggtaaatcctgaatcgtacgggcagccaggaacaacgcgttactttcctgcgtgcttagccagcgttcaccaaacgcctgctggctaagtgtgttcagcaaagtgtactgctcatcgggtagcagtttattttcttccagcaaggagagcattaacgcgttgtcgcgcagactactaccgtaatcacccagccatatccgctcatcactattacgcggcgttttcagcgccagcgcaatcgcttcttcaccacgcgtcgcatcacccatggttttcagcgcaacgccaagttgcagcagcggtaaaccagaagcggcatctgcacgatgctcccagatttcacgcagcgcacccagcggagccttttgctgacgggccaacaccagcgcagcgtaagactgtacggcgaatttactggctttgagattatccgcgtacgggatgctcatcatgcccggatcttgtaaatagcgcagcagacgctcattaccccggttaatggcgtctgtcggcacgctgtaaccctgttcgcctgcgcggaccaggaaatccatcacgtaagccgtcagccagtactcttcgtcaccgtttttatcccacagcgcaaagccgccgttatcacgttgcatttgcagcaaacgggaaatgccgatatcgacgcttgcacggcgtttctcatcactgtcgcctttgatgcccaacgcctgcagttgggctgcgttggtataaagactcggaaacaggccgctggcggtttgctcaagacagccgtacggatacgcttttaactctttgatataacgtgcgatgttcagcggtggtttgccgctcaacaacaattgcccttccagcgtaacagggctgaagttttgcaatccatccgccggaatcgcccatgtctcaccaggctgtaacgccgtaccgtaattaaccgtttgtgccgggaacgccggacggacgccgattttccactgcttatgctgatcggcaacggtttcacccggtaacgctaacccgctaatggtggcctgaatttctccatcgccataacccggcaatgctcgcaccgggataaacagcgtagtacgcacacctggcgctaattcaacggctgcgggactatcgctgaccagttcaagcaaaccactggcggtcagggcaacgttcagtttttgcggtttatcggtaagattagtgatatccagcgtcagacggctggtatcgccactcgccataaagcgcggcatgttcagttcagcaatcaccggtgcggcaactatcactttactttcgttgctaccgaagtcatctgccgtccaggcttgcgccatgacgcgcaattcaccgttaaaatcgccaatcggcagtgtaacgctgccttcgccctgttcgttgagcgttaccggcagcgcctgctgcacgacaatattgacgtgattgaccggcggtttaccaccacgtttcagctcatcaccatcgccaccgaaacgcagagctgccagacgcccctgaccttcaataacctgaccgtaaatatcgtaaatgtctgcgccatagcgtttctgaccaaagaacgcctgccacggatctggcgtgacgtagtcagtaatattcagcacaccactatcaacggcagacaccagcacattcacctgtttaggcttctcgccatttttagtgctggctttaattttcacggttaatggttgattgggacgcatttttgctggtgtttccagcgccagatcgaggcgacggttttcatcgccaagcggcagatgcaacacaccaaccgcgcgttttggcgtcgcggagcgagatttatcgccaggacgtaccaccagcgtacttaaatacagatcatgacgattccaggttttatcgaccggaatcgtcagatccagcccttgagcccgaacatcaatctcttgccaccacagcggcccttcactggactcgaccatcgcataacctttacccgccgttggcgcggcgatatgcaacttaatggtgtcgccagggcgataactggctttatccagtttcagcgtgacacggtcgggtcgcactgcgccgctaccgtcgctgttgtcctgccagctatagccagcccagaaacgaacactactgaccgcttcattcggcgctttgacttccagacgataagcgccccactctaccggaaaactgaccttgccggtttcgtccgctttcagatccagagtttgttcattttcgatcagatctttttgatcaaactgactctgccagccttcatcttcactccagttccagtagtaatcgcggcgttcgcgaatcaggcgcacctgcaagccgctcacggcttttttcacgccttgcgcatcgctataaacgatgtcaaaagcggcgttactgccttcatcaacaatgggctgtttcaccgtgctgtcagtacgataatcgtaaacgcttttgctggcgaactgcggacggatccccggcaatgcatcggcaggccagatagcctgctcagcgcggcgcgtcaccgggcgaccgccgctttccagcaaactaccctggaaaataacctgtaatggggaatgcgtttccttccactggctttctgtagaaacttcgccgcgccctttatcatccagcgtcaactgaacttcatccagcgtgcgggaaagattttcggcagctatatcgccgaattcaaaaccaggtaaggcactcacagcttcacgcagtgggcgcaggaaaagttgcccttgcaaagtattaccattagcaggtgcaccatacaggtagtaccccaccacggagaatttcacttcatctttcggcgttagcggggttttctcaccggtcagattcagcgccatgcgctctggcataaaatcttcgacgtggaaatcccacatccgatactgattatcgcccgtgttagcgcgaatatgccacataccggttgccgcattgctatcgagtggccaggtaaagtggtagaggccattctccggctgactaacgacgctcctgagtacctgcccatcgggtttaatcacgtctaacttgatgggttgattgggcaacgctttaccgtctgcatcacgcagcaaaccattgaggattaccgtttcacctgggcgataaagatcgcgtgggccaaacatgaaaaactgtttgctatagcctggcgcgccagcaatgttaaattctgctaagtccagcgccggaagttttaaatcgagtagcgttgtctgaccgtctttacgcgccaacagtaatgccgcgtttttatcattttccagctgcacatgcccctgagcgtcactggttgcctgagtcagagtctgccctttctcatttaataaagagacttcaattccttgctgggccgcgccgttttccagactttgggtaaagatatccagacgattgtgataacggtgagcactaacgccgatatcacttaacgtaaacagcgtcgcgggattactgtaatcgtaacgtccagcctgattcatcacagccagatacacgcccgcctgctgaagcggtttgatatcgcccagcggcagcaataatttttcacgggtgttacgcgcaggattgagatcaaaccgtccggtgtagaccagatccgccatctgcagcagtttgtcactctgccagttcgccaggctattgcggtattcccattggctaatgaatgctggcagagattctggcttaacgcggaagaagttaacatcgacattattaacgttgagcgccattaccggcagcccttcaacgactttgccaggcagcaggctaccacggctggcaaaaccgacgctgggttggatgtcgcgggtagttatagttttttcgtaatctttactgaaggttgcgttgttgagtgctttgacctccttgccaatagtaacgatcaaatcacgtttcggttcgaggtggcgtaaacgtaactctttaagattatcactcagctcccaggcaccatccactttgccgctttttttatcgacgacatgaataacgcgactgaaatcctgatccgggtcgagagggatggagaacgtcagcaccagcgtggctgcaccatcaagttggacttcagagagatccagcaatgtcagcaccttaccggcactctgttgggccagtttttgtctctccggcacggagagttttgcactactcgcgttttcactagaggccgctttagtaacttcagaaggcgcatcttttttcaccgctgttggcgcgttatcgttgttgtcgcaccctgccagcgccagcattagcatgcaggcggctacgcgtaactttttcatttttcatccctgccacaatggcccgttagcaacgtcgaataattattatgcgtgagaatttacgttatgtaattcagtatcacgcccatacaatccgaattttagtgagaattgtggctcagacagccaaatcagcctcttttgcttgtcgcttttcactaaacatccgacaatttagcctaaccccggcaaaaatggagatgcctatgtccacgacatggtttgtaggagccgactggctcgccgaacatattgatgacccggaaattcagattatcgatgcccgcatggcgagccctggacaggaggatcgtaacgttgctcaggagtatctgaatggacatattcccggcgcagtgttttttgatatcgaagcgctttctgatcacacttccccgcttccgcacatgctgccgcgcccggaaacgttcgccgtggcgatgcgtgaattaggcgttaaccaggataagcacctgattgtctatgacgaaggtaatcttttcagtgccccacgagcatggtggatgctgcgcacctttggtgtagagaaagtgagcattctggggggtggacttgcaggctggcagcgcgatgatctgctgttagaagaaggtgcagtagagctgccggaaggagagtttaacgccgcgtttaatcctgaagccgtggtgaaagtaaccgatgtattattggcaagccatgaaaatacggcgcaaattattgatgcccgcccggctgcacgttttaacgcagaagttgatgaacctcgcccaggtttacgtcgcggacatattcccggagcactgaatgttccgtggacggaactggtgcgcgaaggcgaactaaaaacgaccgatgaactggatgcgatattttttggtcgcggcgtcagctacgacaaaccaattatcgtcagctgcggctctggtgtaacggcagccgtggttttgttagcactcgcgacgctggatgtgccaaacgtgaaactgtacgacggcgcatggagtgaatggggcgcgcgggcagatttaccggttgagccagtgaaataagtattttacaggcaataaaaaaccgccgaatttggcggttttttattgctagtctggttcgcggcctttccagcaggttgacttgtgttacatgagcaacgcaggtgcttcacagcaaaacaatactcaccagtaactctctttttgtcaagcaaaagagagtaattattgtttatttagcgtattatcgacaccggccctttccgccgtgttcggtaataaaataacctggcttattagtccgaattcagacaaatataaataaatcctgctcaaaattaaaaattctaaccggtaaaagatattacttaaacatgtaaattcactttcctttaaaaaacaaaaaaccgccaaaatcaggcggttttttgttgctggtccggttcgcggcctttccagcaggttgtattaccgtagtaatgcaagcgcgtctcagcggagacaatactcgccagtaactctctttttgtcaagcaaaagagagttattattgttctgttagtgtattatccactgcggccctttccgccgtctcgcaaacgggcgctggctttaggaaaggatgttccgtggccgtaaatgcaggtgtttcacagcgcttgctatcgcggcaatatcgccagtggtgctgtcgtgatgcggtcttcgcatggaccgcacaatgaagatacggtgcttttgtatcgtacttattgtttctggtgcgctgttaaccgaggtaaataataaccggagtctctccggcgacaatttactggtggttaacaaccttcagagcagcaagtaagcccgaatgccgccctttgggcggcatattttagattatccgattctgtttaaagtcacgcaaaaaaccaccccagcgacgttcatagaatggcgcaatatgttcggtaataaagtggctaattcctttttccccttttttcacctgacaaatatcgattggttcatcgccaggtaatgtatcggtcgctacacttcccgtcgcctgaataatttcttcgatatcaccatcggcttcaatgccaataagtaaattaggctgtgcctcttcgttctctttaatactacaaataaaagcacgcttcaccggcttaatggttttaaataaggtggtgagactatcaatcatttgtgctggcggctctgcgacttcgcttaatatcaggctttcaccgccttccaggatttcctggctgctcagcggatttccctcttcaccaatcaacaaactgatttcacgcggcataaattctttaccggttggcagtttggcattaaggaagagcgtttcgccaagtgtcatctcaaacagcgtgcgaacgggcattacgacaaatgcctgttcgtcttcaaccgcctgttgaagtgcttctaagctggtgaaaaaaggaatgacgctggtgccgtcttctttttcccagtgctgtaaatcaagcgcgctatcttcaaccacagcctcgccctgcgccgccgtaccaggcacccagacggtggattccagtagagtacggaaaaaggccgggcggtgcgccggttcagttgctgctttttccagcaggtcttcaagttcgttttttgtttcggacataagaaccacaattcattcaacgttcggggcgcaaatgcctgatgcgctacgcttatcaggcctacaagggattcgcaatttgttgaatttgcagaatttgtaggccggataaggcgtttacgccgcatccggcatattagtttacgccgttaacagattagctatcgtgcgcacaccaagtcccgtagcgcccgcagaccactgttcaaccggcgctttacggtaagtcgcgctgcagtcgatatgcagccagccttgctgatagttctcaacaaagtggctcaggaagcccgccgccgtgctcgcgcctgccggatacgccgcgcttccggtattgttcagttcggcaaagttagacggcagctggctgcggtggaactccgccagcggcagacgccagaacggttcgttctcctgcgcggcactcgccagcaagcgaccggccagcgcatcgtcaaaactgaacagcgcgtgataatcattacccagcgcagttttcgccgccccggtgagggtcgccgcatcaatgatcatttccggtttctgcgcactggcatcaatcagaccatcggcaagcaccagacgcccttcggcatcagtgttcatcacttcaacttttttaccgttgcgataggtgatgatatcgcccagcttgaacgcattgccgctaatcaggttatccgcacagcagaggaacagcttcacgcgcttgttcagtccgcgcgtaatggcaaatgccagcgccccggtaaccgttgccgcgccgcccatgtcgctcttcatgctgtccataaacgcagtctgtttgatgctgtagccgccggagtcaaaagtgatacctttacctaccaggcacgcgtacactggcgcttctttatcgccagttgggttgtaatccagcgccagcaataccggagaacgttcactaccgcgtccgactgtgtgcagccccatataaccttgctcacgcagatcttcgcctttggtgatccgataagtcacacgatcgcccgcgacgttgctgatcagatcaacagcacgctgtgccagttggcttggtcccaattcttctgccggtgcgttgatggtgtcacgcacccagtcgatgatcatcaggcggttatccagttcctggcgctgggcatcgtccagatccggccacaccactttacgcgtgcctttcggggctttgtaaccttgccagaatgcccagcagcgatccgcatcccagccttcaccgcttaactgaacatgcttgatgcccagaccgtcaatcttgcgcgccgcacgctggatcagccccagatcgtctgccccgttcaaatgcagggtaatgccgtcattattaatgctgtaagttgctttttctccccagcgcgcgtcggcaggttgggtagagagggtaatcttcatcgcttctgtcattttagttatccttctttgtaaaagggccgccagttggcagccccaggatttttccgctaaatgattcgcgttgcaggaaggcggcaagtgagtgaagccccaggagcatagataactatgtgactggggtgaacgagcgcagccaacgcatctgcggcgtgaagcatgacgcggaaattattcggcctcgtccagccagactaacaaaatcgcttcgaggattttctcgttggatgcctgcgggtcgtcgtcgaaatcttccagatcgcaaatccactgatgcatatcggtgaatcgaaccgttttcggatcaagatcgggatacgcatcgtacagtgcttcgccaatttcgcggctatcggtccacttaagtcccatactaacctctgttaatgctcacgcgcatggttgatagtgtaacgcgggatttcgactactaaatcttcgtcggtaacgcgcgcctggcagcttaaacggctttccggctccagtccccaggctttgtccagcatgtcgtcttcctgctcactgctttccggcagactgtcaaaaccttcacgaacgatgcagtggcaggtggtgcaagcacaggatttttcacaggcgtgttcaatctcgataccgttacgcagagctgcgtcgagaatggtttcaccgctattagcttccagaacagcgccatcagggcagagatcctgatgaggcaaaataacaatctttggcatattaaacctcgtccacggaatggcctttcagcgcacgacgaacgctctggtccatgcggcgagcggcgaaatcctgggtttgtttgtctacgtttttaatcgcttgttcgatggcgtcaacatcatcgccctgcgccacttcactcaggtgagcggcagcatcgtcaatgacctgacgttctgcggcgcttaacagcgcggcatcagcagccagcgcgccgtgcagactttccagcacacgcgccgcttctactttttgttctgccagcattcgggcttttacgtcctgctcggcatagctcatactgtctttgatcatgctagcgatttcgctatcggtcagaccgtaagacggtttgacctgaatagacgcctcaacgccggtggatttctccatcgccgtcacgctcaaaagaccgtcggcatcgacctggaacgtcacgcgaatatgcgcaccgccagccggtagcgccggaataccacgcagcgcaaaacgcgccagactgcggcagtcctgcaccagttcgcgctcaccctgcattacatggatagacatcgccgtctgaccatctttaaaggtggtgaaatcctgagcgcgggccaccggaatagtggtattacgcggaatcactttctccaccaggccgcccatcgtttcgaggcccaggctcagtgggatcacatcaagcaacagcatttcgctgtctggcttgttacccaccagaatatccgcctgaatcgccgcgccaatagcgacgactttatccgggtcgatggaagtcagcggtggacgaccgaaaaattcgcctacccgttcacgcaccagcggcacgcgagtagaaccgcccaccatcaccacttccagcacttcatcagcttctacacccgcgtctttcagcgcgcgacgacaagccagtaaggttcgttttaccagtggcgcgatcagttcattgaattgttcacggctgatttcgccctgccagcccgcaacgttaacggtcacggagtccgcatcgctcagcgcgattttggctgcaatggcggcatccagcagttcacgctgaacgcggttatcgctacgatcaggaatgcccgcctgctcgcgaatgtaatccgccagcagatggtcgaaatcatcgccgccgagcgcggaatcaccgccggttgccagcacttcaaacacgccgcgacttaagcgcagaatggaaatatcaaacgtcccgccaccgaggtcataaacggcgatcacgccttcctgaccggaatccagcccgtaggcgatagccgcagcggtcggttcgttaagtaagcgcaggacgtgaaggcccgccagacgcgccgcgtctttggtgccctgacgctgggcatcgtcaaagtacgccggaacggtgataactacaccatccagctcgcctgccagggcttcagttgcccgcgccgccagtgctttgaggatgtccgcagaaacgcgcaccgggttcagcagccccgccgccgtttcaatcatcggcaggccgttttcgctggcctggaattgataaggcagatgcggatagcgttgctggatatcagccaggctgcgtcccatcaggcgtttaacagaactaattgtgttggcggtatcgagcgctgcattagtacgcgcgtcataacccacgctatgcccttgctgttgatagtgaacaacagatggcagcaggtgacggccttcatgatcggctaacgtttcggcctgaccgctgcgcactgtcgccaccaggctgttggttgtgcccaggtcaataccggccgccagacgacgctgatgcggcgcagcactcaaaccaggttcactaatttgtaataaggccatgtttagcttccagaaattaaaaatcgagcagtttttcttcgagttgttcggcactgcttcgcagtttatcgagaaaacgcagcttacgcacggtatccgccgccgcgtcccacgtctcgttgtctaactgttcaaccatcaactgatggcgggtatcaaacatctttttcacacgtttgataaagctttccagccgcgcttcatctttcgcctgttcgatctcgtccagctcttcgcgcagctccaactgttccatcaggaacgcggtgtcgcgcacagtatgctgctcgctggcgagatcaaagccgtgcaaagaaagcaaatattccgcgcgcattaacggatgacgcagcgtttgccaggcctggttaatggttgcagattgctgtacggcggcgagttgttccgcctggcttccgctggcgaatttatcaggatgatactgacgttgtagatcctgaaaacgcaggctcagcgcctgggtatcgagttgatagcgggcaggcaagccaaagagggtgaagtaatccataacattctcagggctgcgatccgccgcgataacggcgaatcaggtaaaacaaaccccacgcgcaggcgaccacggtggggttatcggtatgcgcatcaaacgtggaagctttcgccgcaaccacactcatctttgacgttcgggttggtgaatttaaacccttcgttcaggccttcttttacgaagtccagctgcgtaccgtccagaaattgcaggctcttgccatcgaccacgactttcacgcctttgtcttcaaacacgatgtcttccggcgtcggttcgtcaacaaattccagtacataagccataccactacacccggaggttctcacgcccagacgcaggccaaaccctttaccgcggttagccagaaaggtatttactcgcgctgctgcactgtcgctcagtgtaatgctcataaccaaacctcaactcttattttgcttcacgtttgcttttatagtccgcaatggcggctttgatcgcgtcttctgccagaatagaacagtgaattttcaccggcggcagttcaagttcttcagcaatatcggtgtttttgatcgcctgcgcttcgtcgagagacttccctttcacccattcggtgaccagggagctggaagcgatagcggaaccgcagccgtaagttttaaaacgcgcgtcttcaatgataccttcatcgttgactttaatctgcaacttcatcacgtcgccacaggccggtgcccccaccatgccgctgccgacgttctcgtcgttgttgtcaaaggaacccacgttacgcggattctcgtaatggtcgataactttttcgctgtaagccattataaattctcctgattccgataccgattaatgatgagcccattcgatgctgttcagatccacgccctgcttgtacatttcccacagcggagaaaggtcacgcagacgaccgatggatttacgaactaactcgatggtgtagtcgatctcttcttcagtagtaaaacgacctaaagagaaacggatagagctatgtgccagctcgtcgttcagccccagcgcgcgcagcacgtaggacggttcgaggcttgcactcgtacaggcggaaccactagaaactgcgaggtctttcagcgccataatcaggctctcaccttcaacgtagttgaagctgacgttgagaatgttcggcgcaccgtgttccaggtcaccgttcaggtaaacttcttcgatatctttgatgccgttccacagacggttacgcaggccgcgcagacgttccatctcggtcgccatctcttcttttgcgatgcgataggcctcgcccattccgacgatctggtgaacaggcagagtgccggaacgcataccgcgctcgtgaccgccgccgtgcatttgcgcttcgatgcgtacgcgcggtttacgacgtacatacagcgcaccgatacctttcgggccatagattttgtgaccggagaaagacatcaggtcaactttcaactggctcaggtcgataggcagtttacccacgctctgggttgcatcaacgtgatagataatgccacgagcacggcacatttcgccgatagccgcgatatcctgcaccacgccgatttcgttatttacgtgcatgatggacacgaggatggtgtcgtcacgcatcgctgcttcaagttctttcaggtcgataatgccgttacgctgcggtgccaggtaggtgacttcaaaaccttcgcgctccagctgacggcaggtatccagtaccgctttgtgttcggttttgctggtgatgatgtgcttgccttttttctgataaaagttggctgcacctttgatcgccaggttgtcagattcggttgcaccagaggtaaagacgatttcacgcggatcagcgccgaccagatcggcaatctgattacgggcgatatctaccgcttcttcagcctgccagccgaaacggtgagaacgggaggccgggttaccaaaggttccgtccatcgtcataaactgcatcattttctcggcaacacgcgggtccaccggcgtggttgcggagtagtcgagataaatcggtaatttcattgctctataaactccgtacatcactcaatgcaaggaatcaggctaccggctggatgtacgaccgtgtttacggagtatttagcactccggcctgattctgaattctttttattaagcgcgtaacttaacgtcgatcgcgtcttgtgtgcgggtgcgtggcgcgtcgtgagtatgctgacgaccagacacatccagcacttcctggttattaaccagttcgcctaaagtaatgttgttgagaaaaccggtgagacggtcgctcaaatcacgccacagcgcgtgggtcaggcatttatcgccgccctggcagccgcctttaccctgacaacgggtggcatctacagattcgtcaacggcgctaattacttcgccaacggcgatgctgctggcatctttgcctaacagataaccaccgcctggtccacgtacgctggaaaccagaccatttttacgcagacgggaaaacagttgttccagataagaaagggaaattccctgacgttcggaaatatcagccaacggtaccgggcccgcttcagagttgagcgcaacgtcaagcattgcggtcacggcatagcgccctttagatgtcagtctcatgtcttacttcacctcaaactcgcccctgcccggggttttttattgtaaaagtgggggtattgcatagcagggtcaagtctgacattcccgagtaaattggtcaactatttacttgactgatttagtcgggtatttaaccttcagtgccatttttttatcgtggcgtttgtacctgttgtcggatgcggcgtgaacgccatatccgccctggggttctgtacactgtaggcctgataagacgcattacgcgtcgcatcaggcaacggctgtcggatgcggcgtgaacgccttatccgacctacggttctgttcactgtaggcctgataagacgcattacgcgtcgcatcaggcaacggctgtcggatgcggcgtgaacgccttatccgacctacggttctgttcactgtaggcctgataagacgcattacgcgtcgcatcaggcaacggctgttattcggccttgttacctttattctgctgctcaatagaagccagaatcccgcgcaggatattcaactcctggctttccgggcgcgcacgggtaaacagacggcgcaatttattcatcacctgccccggatggttttcacggataaaaccggttgccagcagcgtttgttccagatgaccataaaaacgctccagatcatcgaccagcggatacggcgtctcttcatgctcgacctgctcgccgttttcctgagttgccagccaggccatgcgcacttcataggcaataacctgaaccgccatcgccaggttcaggctgctgtattccgggttagccgcaatcgcgacatgataatggcatttctgcaactcttcattggtcaagccgacgcgctcgcgaccaaacaccagcgccaccggggtatttgccgcttcagcgacgcttttcaggccgcattcgcgcgggtcgagcatcggccatggcagcgtgcgggaacgtgcgctggtgcccaccaccaggctacaaccggctaacgcttcgtcgagcgtatcgacgatgtgagcattaccaatcacatcgctggcccctgctgccagggcaatcgcctgggagtcgggtttcaccagtggattaaccagccacagattggttaatcccattgttttcatggcacgggcaacagaacccatattgccggtgtgactcgtctccaccagcacaattcgaatattttgcagcattgtctttcttcatctaaagattattcacgcatcttatcataaaacgaagacagatgccgatctcgctgctatactctgcgccgttttcccgttctttaacatccagtgagagagaccgatgcatccgatgctgaacatcgccgtgcgcgcagcgcgcaaggcgggtaatttaattgccaaaaactatgaaaccccggacgctgtagaagcgagccagaaaggcagtaacgatttcgtgaccaacgtagataaagctgccgaagcggtgattatcgacacgattcgtaaatcttacccacagcacaccatcatcaccgaagaaagcggtgaacttgaaggtactgatcaggatgttcaatgggttatcgatccactggatggcactaccaactttatcaaacgtctgccgcacttcgcggtatctatcgctgttcgtatcaaaggccgcaccgaagttgctgtggtatacgatcctatgcgtaacgaactgttcaccgccactcgcggtcagggcgcacagctgaacggctaccgactgcgcggcagcaccgctcgcgatctcgacggtactattctggcgaccggcttcccgttcaaagcaaaacagtacgccactacctacatcaacatcgtcggcaaactgttcaacgaatgtgcagacttccgtcgtaccggttctgcggcgctggatctggcttacgtcgctgcgggtcgtgttgacggtttctttgaaatcggtctgcgcccgtgggacttcgccgcaggcgagctgctggttcgtgaagcgggcggcatcgtcagcgacttcaccggtggtcataactacatgctgaccggtaacatcgttgctggtaacccgcgcgttgttaaagccatgctggcgaacatgcgtgacgagttaagcgacgctctgaagcgttaatgactcaggcgggtgatatcactcacccgccctcgcctttcaggcgctattccgaaatacttcctcactgctttactttctttcgtcactctcccaccatctttccccgattaatggatgataaagaagagccaaggaaaggttatggcactgccagtgaacaaacgcgttcccaaaattctgtttattctctttgttgttgccttctgcgtttatttagtgccgcgcgttgccatcaacttcttctattatcccgacgataaaatttacggtcccgatccctggagcgcggaatccgtcgaatttacggctaaggacggtactcgtctgcaaggctggtttatcccttctagcacgggccctgctgacaacgccatcgcaaccatcattcatgctcacggcaatgccggaaatatgtccgcccactggccgctggtcagttggttacccgagcgtaatttcaacgtttttatgtttgattatcgcgggtttggtaaaagtaaaggcacgccgtcccaggccggattgctggacgatacgcaaagtgccatcaatgtggtgcgccatcgcagtgatgtaaacccacaacgtctggtgctgttcgggcagagtattggcggggcgaatattctggatgttattggtcggggtgatcgtgaaggcatacgtgcggtgatcctcgactccacatttgcctcttatgcaaccatcgccaaccaaatgatccccggcagtggctacttacttgatgagagttacagcggcgaaaattatatcgccagcgtcagcccgatcccgcttttactcattcacggtaaagctgatcacgttatcccatggcagcacagcgaaaagttgtatagcctggcaaaagagccaaaacggttgatcctaatcccggatggcgaacacattgatgctttttccgatcgtcacggcgatgtttatcgcgaacagatggtggactttatccttagcgcgttgaatccgcagaactaacccatgatcgctagcacgataatcattcacaaaaccaccttaagacatgctaatccactggtcagaacagtttaagatgagaaaaattctgtgacgcttgccaacatttctgatgattagcattcccttcgccatttccttgagcaaactttagctattcttatcaattatgcttatgggagatctacagatgatgcctacgcttgctccaccatctgtccttagcgctccccagcgccgctgccagatcttgctgacgctctttcagccggggttgaccgccaccatggcaaccttcagcgagcttaatggtgtggatgatgatattgccagtcttgatatcagcgaaacaggacgggagatcctgcgctatcatcaactcacactgacgactggttatgacggtagctaccgggttgaaggtacagtgcttaaccaacgtttgtgtttatttcactggctacgacgtggtttccgtctgtgtccgagttttattaccagccaattcacccccgccctgaagagtgaactgaagcggcgcggaattgcgcgtaacttttacgacgataccaatctacaagcgttagtgaatctctgctcccgacggctgcaaaaacgctttgaaagccgcgatattcatttcctgtgtctgtatctgcaatattgtttgctgcagcaccacgctggaattacgcctcagtttaatccgctccaacgtcgctgggcggaatcctgccttgaatttcaggtagcgcaggaaattggacgccactggcagcgtcgggcgctccagcctgtaccacctgatgagccactgtttatggcactacttttttccatgttgcgggttcccgatccattgcgggatgcgcatcagcgggacagacaattgcgtcagtctatcaaacgtctggtaaaccattttcgtgagctgggaaatgttcgtttttatgatgaacaggggttatgtgatcagctttatacccacctcgcccaggcgttaaatcgcagtttgtttgccatcggtattgataataccctgccggaagagttcgccagactgtacccacgcctggtgcgcaccacccgcgcggcgctggccggatttgaaagtgaatacggcgtccatctttctgatgaggaaagtggtctggtcgcggtgattttcggtgcctggctaatgcaggaaaacgatctgcatgaaaaacagattattcttcttaccgggaatgatagcgagcgagaagcgcagattgagcagcagttacgcgaactaacgttactgccgctcaacattaagcatatgagcgtaaaggcatttttgcagacaggcgctccgcgtggcgcggcactgattattgcgccttataccatgccattaccgctctttagtccaccgctgatctatacggacctgacgctgacaacacatcaacaggagcagatccgcaaaatgctcgaaagtgcatgatcagcaactgggaacaactttcgggcgcaaaaacattgccggaagcgccaccagcgccattacccagaacacgccgtggcccagatattgatacaggaaaccggcgaaaacggtcatgatagcgatactgccgcccatcgcgacggcagagtaaaccgcctgtaaacggatgacttcgctaccctggcgagcagcaatataacgcatggcggccaggtggcagaccgtgaaggtgccgcaatgcagaatttgcaccactatcaaccacggcaacgccgtagttgctcccataatgccccagcgcactacgccgcaaatcgcgctgatcaacagcatatcgcgtgcactacaacggcggaaaagtttattactcagcgcaaagataatgacttccgccaccacgcccaggctccacaaataccccaccgcgctggcgctgtagccagctgcctgccagtaaatggcgctaaaaccgtaataggccgcatgtgccccctgcaataaacaaacgcaggccagaaagcgccagttctggcgaaccagcgccaaccacgcagaccaaccggtgctctcctgctggcgacttgccccttgtggctgaatcgtcggacggatgagaaagccgagcagcatggatgccacgcccaacgtcaacagcgcgaggatcacccgataatcaaacatagtgaccagtttgcccgtcagcgcgctgccaatgacaaacgccacgctgccccacagtcgcactttgccgtaatcaagcgggaactgcttttgccacgtattcgccagtgcatcggtcaacggtaccagtggactgaaaaagaggttaaagccaatcatcaccagcatcagccacgctacgtgcgcccccgcccagaaggcgacagcaaagagaagtgtcagcagtgccagcacgcgcaaggcggaaatcaggcgggaaggatcgctgacgcggggcgcgatgagcaaactcccgaggaaacgggcaaccagacctgcccccaataacaggccgatggtttctggcgttaaaccaatccctttaagccagacgctccagaaaggtagaaaaatgccgtaactaaaaaagtatgtgaaatagccgagcgccaaccagcgcgtggattgcaaaaccatgagtccctcccgtcaggaggcgttagtctggggttaatcgaatgttggtgcaagttgaaaaataagaatattcgagcctgcttcccgatgtctgtaacgccagttcacaagcactaaaaaactgagatccgcgacgcatgttgcaaaaataatgcgtaattatgccgttacgcttgccaaacgttcctgcacaatggcgatgaaatcgcgtaatgccggcttcatctcccctttcttccacgccatcagtaaagcaatggaaggcacatttccggcaatgggacgaaaaacaacctgtccggtattaaaattattcatataaccgggtatcaaagtgacgcccagccccatgcccaccagattcatggtcaccagaatattcgttgccacctggacgatatttggctggctgttttcttgcgcaaaccacgctttaacgatcggcgcaaggctaccggaatacaccggatcggtactgacgaaattcacgccatccagttgcgcggcggtgatctctttttcatgtgctaaagggtgatcaaccggtaacacaaccactaatggttcgtcaaaaagctccagataatcaatctccgggctataaacaggatggcgcattaagccgacgtcgagttcaccacggcgaattttttcctcctgttgcgtggtgattaaactcaccagctcaatcaaggtgtctggctgtctgagacgaaacatcggtaatacttttggcagtaaattcacttccgcgcttggcacaaagccaatggttaattgtctgtcttcctgaacaattttccgcgcccgtaatttggcattttccgcttgttcgaggattgccagcgcgtcctggagaaaacattctcccgccgccgtcaacgcgactttgcgcttatccctcaccagtaacggaacaccgacacagttttcaagatcgcggatctggctgcttaagctaggctgactggtatgcagtttttccgccgcacgggtaaagttcagtgcctgcgccactgcgacgaaatagcgtaaatgccgtagttccatcaccttccccttgttatcgaaaaaacgtctcagctggtagaaattaactatttcacatattagcaaccaaccagcaacatccttatggcacaaaaatagaaggtcaatacatcttatctttcaggattaaaaaatatgaccacacccagtgatttgaacatttaccaactgattgacacccaaaatggtcgggtcactccgcgtatttataccgacccggatatttaccaactggagcttgagcgtattttcggtcgttgctggctatttctcgcccacgaaagccagatcccaaaacccggtgatttctttaacacctacatgggagaagatgcggttgtcgtagtgcgtcagaaagacggcagcatcaaggcgtttctcaaccaatgccgccaccgggccatgcgtgtgagttatgcagattgcggcaacactcgcgcctttacctgcccgtatcacggctggtcttatggcattaacggcgagttgatcgatgtaccgctggaacctcgcgcctacccacaagggttgtgtaaatcccactggggactaaacgaagttccttgtgtggagagttataaagggctaatttttggcaactgggataccagcgcaccgggcctgcgtgattacctgggtgacattgcctggtatctggatggcatgctggatcgtcgcgaaggcggcaccgaaattgtcggcggcgtacaaaagtgggtgatcaactgtaactggaaattcccggcagagcagttcgccagtgaccagtatcatgctctgttcagccatgcttctgccgttcaggtattaggggcgaaagatgatggcagcgataagcgcctcggtgatggacaaaccgcccgcccggtgtgggaaaccgccaaagatgcgctgcaatttggtcaggacggtcacggtagcggtttcttctttactgaaaaaccggatgctaatgtctgggtcgatggcgcagttagtagctattaccgcgaaacctatgccgaagcagaacaacgtttaggtgaagttcgcgccctgcgcctggcgggtcataacaatattttccccacgcttagttggctaaacggcactgccacactccgcgtctggcatccgcgcggccctgatcaagttgaagtgtgggcgttctgtattactgacaaagccgcctccgatgaagttaaagccgcttttgaaaacagcgccactcgtgcttttggtcctgctggttttctcgagcaggatgacagcgagaactggtgtgaaatccagaaattgcttaaaggccaccgcgcccgcaacagcaaactgtgtctggaaatggggcttggtcaggaaaagcgccgcgacgacggcattcctggcattactaactatatctttagtgaaactgccgctcgtggaatgtaccaacgctgggccgatcttctgagtagcgaaagctggcaggaagtgctcgataaaaccgccgcttaccagcaggaggtgatgaaatgagtgcgcaagttagtctagagttacatcaccgcattagccagtttctctttcacgaagccagcttactggacgactggaaatttcgtgactggctggcgcagctcgacgaagagattcgttacaccatgcgcaccacagttaacgcgcaaacacgcgaccgccgcaaaggcgtccagccaccgacaacctggatttttaatgacaccaaagaccagctggagcggcgaatcgcccgtctggaaacgggcatggcctgggcagaagagccgccgagtcgcacccgtcacttaatcagcaactgccagataagcgaaaccgacatcccaaacgtatttgctgtgcgggtaaattatctgctttatcgggcacaaaaagagcgcgatgaaacattctatgttggaacgcgtttcgacaaagttcgccgtctggaagatgacaactggcgcttgctggaacgggatatcgtcctggatcaagcggtaatcacttcccataacctgagtgtactgttctgatgaatcgaatttatgcgtgtcccgttgcggatgtgccggagggtgaggctctccggatcgataccagccccgtcatcgccctgttcaacgttggcggcgagttttatgccattaacgatcgttgcagccatggtaatgcgagtatgagtgaagggtatctggaagatgacgccacggtggagtgcccgctacacgccgccagtttttgcctgaaaacggggaaagcgttatgcctgcccgccaccgatccgctcaccacttatccagtacacgttgaaggtggtgacattttcatcgacttaccggaggcgcagccatgagcgatctgcataacgagtccatttttattaccggcggcggaagcggattagggctggcgctggtcgagcgatttatcgaagaaggcgcgcaggttgccacgctggaactgagcgcggcaaaagtcgccagtctgcgtcagcgatttggcgaacatattctggcggtggaaggtaacgtgacctgttatgccgattatcaacgcgcggtcgatcagatcctgactcgttccggcaagctggattgttttatcggcaatgcaggcatctgggatcacaatgccagtctggttaatactcccgcagagacgctcgaaaccggcttccacgagctgtttaacgtcaatgttctcggttacctgctgggcgcaaaagcctgcgctccggcgttaatcgccagtgaaggcagcatgattttcacactgagtaatgccgcctggtatcctggcggcggtggcccgctgtacaccgccagtaaacatgccgcaaccggacttattcgccaactggcttatgaactggcaccgaaagtgcgggtgaatggcgtcggcccgtgtggtatggccagcgacctgcgcggcccacaggcgctcgggcaaagtgaaaccagcataatgcagtctctgacgccggagaaaattgccgccattttaccgctgcaatttttcccgcaaccggcggattttacggggccgtatgtgatgttgacaagccggcgcaataatcgcgcattaagcggtgtgatgatcaacgctgatgcgggtttagcgattcgcggcattcgccacgtagcggctgggctggatctttaaggaagcacgatgaaagaaaaaacgatcattattgtcggtggcgggcaagcggcggcaatggctgcggccagcctacgccagcaagggttcaccggtgagctgcatctgttttccgatgagcgacatcttccttatgaacgacctccactcagcaaatccatgttgctggaagattccccgcagttacagcaggtgttacccgctaactggtggcaggaaaacaatgttcatctgcattccggtgtaaccatcaaaacgctgggtcgcgacacacgagagttagtgttaaccaacggcgaaagctggcactgggatcagctttttatagcaaccggcgcggcagctcgaccgctgccgttgcttgatgcactgggagaacgctgctttaccctacgccatgccggtgatgccgccagactgcgagaagttctgcagcccgaacggagtgtcgtgattatcggtgccggaactattggtctggaactggctgccagcgccacgcagcgcagatgtaaggtgacagtgattgaactggcggcaaccgtcatgggccgtaatgcaccaccgcccgtgcaacgctatcttttacagcgccaccagcaggctggtgtgcgcattctgctcaataatgccattgaacatgtggtcgatggtgaaaaagtagaactgacgctgcaaagtggggaaacgcttcaggctgatgtggtgatttacggtattggtatcagcgccaacgagcaactggctcgcgaggccaaccttgatactgccaatggcattgtcattgatgaggcttgccgcacctgcgatcccgcgatctttgccggtggcgatgtggcaatcactcgtcttgataatggtgcactacaccgctgcgaaagctgggaaaacgccaataaccaggcgcaaattgccgctgccgcaatgttagggctaccgctaccgctactgccgccgccgtggttctggagcgatcagtacagtgataacttacagtttattggcgatatgcgtggcgatgactggctttgtcgtggcaacccggaaactcagaaggcgatttggtttaatctgcaaaacggcgtgcttatcggtgcggtcacgctgaatcaggggcgtgagattcgcccaattcgcaaatggatccagagcggcaaaacgtttgatgcgaaactgctgatagatgagaacatcgcgcttaaaagtctgtaaccaggataattagcgaatatctcaatgcctggggcgtggcgaggtgcaagagtgtgtattacgtttaaaagtcattatcttgcaaagggattggttatgaacacactacgttattttgattttggagctgcccgccccgttttgttattaattgcccgtatcgccgtggtcttaattttcattatttttggttttcccaaaatgatgggctttgacggtacggtccaatatatggccagcttgggcgcgccaatgccgatgctggcagcgattattgcggtagttatggaagtgcccgccgcgatattaatcgtgcttggctttttcacccgtccgctggcggtgctgtttattttctacacgctgggtacggcggtgattggtcaccattactgggatatgaccggcgatgcggttgggccaaatatgattaatttctggaagaatgtcagtatcgctggcgcgttcttgctattggcaattaccgggccgggggcaatttctctcgatcggcgttaagaaagatgccggatgcggcgtgaacgccttatccggcatttaataaattacagccactctacccgcaagctcatctcactagttgtactttcccctggtgctagcgcaatgagatcacccccttccgggcgatgatgatcatccggcgcatggctcatcggttccagacagaagaaatcaaacgcatatcctttatcaaacgcagggtcggaaacaaagatgaaataacacggtgcaggtggcgtcgtttccatgatgatggcataaccttcctgcggctgctcgatgcgggcctgaccattccatccggcaaaaccattgttcacccactggcgcggcaacggcgcgggctggttaaaatccagttcctgcggtagctgctcgcaaaactcacccgccagccactgctcccgctccagccagtaaccgctcgcctgtgcctgaatccgcgtttgcgggctcaacggaaaataaggatgccagccggtaccaaatggcagcgtctctgccccttgattggtgacagagagcgtcaccgtcagcgtatccgccgttaaatgaaacgcctgacttacccgatagtgatagacaccgctgcgatgttcatacaccagacacaaactatcatcgctgtggctgacacattgccactcgcccagccagccatcgccgtgtagatagtgcgcatcccactcaacattcggttgcagttgatactcacgcccctgccagacaaaacgattgccgctcacccggtttgcaaatggcaccagcggaaaacaactggcatcggttgccacaccgctttttttaccaggacgtaagagcggcgtcgtatcgcgccagaagccttcgattacgccgccctggtcagaaacgtccagctttaggctcccgtgggataaggtatagatggtcatccgctaactccttaatccgggaagttaatcacaactttcccgcatttgccgctcgccatcagcgcataggcatcacctgcctgttccaggctgaagcgatgggtaatggcgttacgcggccacagcttccagtccgtcagatcatgggcgcatttttccatatggaacagactggtcacccaggagccgataatccgccgttgatggtgcatcagatcggcgctgacctcgaattccacttttccggtttcaccaatgtaaaccacccgtccccagtcagcggtggattgcagtgccagcaagcgacctgcggcattaccggaacaatcgagcgcaacatccgcgccaccgtgggtgagttcggcgataatctgcggcagaccttcggtggttgctaaatagccgtgatccatcacccctaactgttttgccatcgccagacgttccggcagcatatcaacgccgatgatccgttttgcaccgcgacctttcgccagcatcatcgccatcatgccgactggccccagaccgaccaccagcacgttatcactgccggaaacttcgccgcgcaaaattccttcatacgctgtaccaacgccgcaactgataaacgcaccatcttcgtagctcagcgcatccggcaggaggatcagatctttttcttccgccagcaagtattcggcatgaccgccgtcacgctgccagccgtaagccgcttttccttcgccagtacaagaaataggaaaaccgcgacggcagttcgggcaaaaaccacagccagaaatgtgatacaccagcacgcggtcgccctctttaaaatggcggcagccttgccccatcgccacaatctgcccgcacggttcatgaccgttgataaagccctggtataacggtttatcgggtgccgccgctgtggcacggtgttgatgatagatatagtggacatcgcttccgcaaatcccggaggatttcattttgatcagtacctggttaatccccggcgtcggcaccgcaacttcccgcagatcgacggtgctatttcctggtaaataagctgccagcatcgttttcataaatccctcattaacaatacgattaattttcatccctgccgcacccgcgccaggggcgttaaggtttagcgtttcgctttactgcttcgctgggtcagcaagatattcgccagcaccgccaccacgatgatgacgccgcgtaccacctgctggaaaaaggagttaataccgagcagcaccagaccgttaccgattagcgtaatcaccagcacaccaagcaatgtaccgaacagggaaccgcgaccgccggaaagtgccgtaccgccgaccacgaccgcggcgatgacgtcaaactccagaccgtttgcggcacctgcgttaccagaaccgaggcgcgccgccaacaaaatgccggtcaccgccgctaataatccgctaagggtaaagataagaatgcgcacccgacgaacgttgatgccgcacaactgcgccgccgtagcattaccgccaacggcaaaaacgctgcgcccgaaggcggttttgcggctgatgaacacaaacagcgcaaacaacacaatcatgatcagcgcggataccggcacaccgagaaattgtccgcccagccagtccagcacctcgttttcatcaatcggcactggcagtgcgttcgtcataaacagccccattccgcgcagggcgctccacagccccagtgtggcaacgaaacttggtacattaaacacgccgcgcagcaccccggccagcgttcccatcagcgcgcctaacagcaacaccagcaggcacgccaccgccagcggaacttcaaattgcagcaaaaatgccaggcacacgctgacaaaagccaccatcggcccaacgctgacatcaatttcaccggagataataatcagcgtcatcgcccaggcggcaatcccaatggtggcggcatcgcgcagcacgttcatctggttattcaaactgataaagccaggcgcgttcagggagaagaccagataaagaatggcaatcaccaccagcaaaccgatctcattaatatggcgactgacaaattgtttgaggctgacgctcttgccctgcggcaatggtaaactgctagcagacatcttcaggttcctcggtaaaattcatcagtgcacagacagaatggcggacatcagctcatccacattgaccggagcgtgaaactcctggctgaacgtgccgtgctgtaataacaggatgcggtcacacaccagcggcaactcctccacttcactggagataaacaccacgctttttccttcggcagccagctcacggacaatacggtaaatctgctgtttggcttcgatatcgacgccgcgcgttggctcgtcgagcaacaaaatctggctggcagcatagacccaacgaccgatcaccactttttgctgattgccaccagaaagcgtgccgatgggtgtttcgctactggcggccttgaccgtcatccgctgcatcacctcttcggtcaggcggcggatggtggaccattgcagcacaccgttggcgctgattttttgccgattggtcagcactgtattttcgtcaacgcccaaccagggaatgatccccgcttctttgcggttttctggcgtatagccaatgccgcgtttcagcatgtcgccgtaatcggggcgcgtgattttctcgccgttgataacaatttcgccctgttcatactcctccagcccaacaatcgccttcagcaattcactgcgccctgcccccagcagaccagcaatgccgagcacttcgccacgacgtagcgtaaaactgatatcctccagcttgggcttatggcgtaacgcacggacttccagcacggcctgatccacaatttcctgaggggctaccggcgcaatatcaacgtgatcgcgcccgagcatcaggctcacaatatgatgcgtggaggtgttttcgagcatcacatcgcccgccacctgaccatcgcgcataacggtggcacaggaggcaatgcggcgaatttcttccatccggtggctgacataaatcaccgccacgcccagtgcgctcatctttttcaccgcgctgatcaccagttcaacttccgcactcgcaaggctactggtaggttcatcaagaatgaccacgcgcggctcgcccttcatcacccgcgcaatttccaccagctgcttttgcgccgggcttagcgtactaacaagttgttcaggactaacgtcaacgcccagcgcctgtaagcaacgttgggcatcctgcgccatttgcaggtaatcaatcatgccgttgcggcggggccactgaccgaggcagaggttttccgccactgtcagcccttccaccagacttaactcctgataaaccgcgcgcacccccagttcagcggcacggcgagtcagcgtagcttcgtcaccttccagtcgcgtctcgccaatccagatatcaccgctatccgggcgttcgctgccggtaagcattcgaatgagagtgcttttgcccgcgccgtttttacctaacagcgcacgaacttcgcctttattgagcgtgaagttaacgttatccagcgcaacgacgccgggataacgcttatttcctgccaccacttttgctaccgggactgcctctgttgccgtgaacatagggacctctgcgaatcagcgattagggcagaccatcaacgtgcgttgccagccactgtttaccgtcttccgttttggtatagagatcgataggcacctgaatcactttttcaccgtcggcttgtttattgataaccttcaatgtttgcgcgaaaacagcattgcccattttcttaccggaaatatccactaccgctttcagcacctgattgttttccagctcctgagcaatttcggttgtcatatcgctaccgaaaacagcaatttttccggcctgattttgattacgtaccgcttttaccgcgccgagtgtcgcaccgccgctttcccccataatggcgttgagatccggcgtggagataattagtttttcaccaacggaaatcgctttatctaaaacagtcccttcctgattagcgacaatttgcgcgccgggaacgcgggattttaaaacttcttcaaatcctttacgtcgctgcacacaaacttcaaaggcttcgcaattgatgacggcaattttcggctggtcaattttattggcaataaaataatcagcggcagcgttacccagttttttaccaaattccagcggatcgccgaccagatacgcgctgacatatttatcgacccccttttgattaatacaggtgttgtagcaaatcaccggaatgcccgcttcactggcgcgacgaacggtacggctactgccattttcagacactgcgcttaaaataatggcatcgacattacgcgccacgagggtatcaacaaaggtactttctttgctaatatcaccctgggcgttagtttctattaactgaacttgtacactggaatcttttgccgcatcctgaacgccctgacgcactccagcgtagtatccctgagtatcaaggtatattgcgccaatggtcatttctttttccgcagccctggcaaatagtgcgctacctaatagcgtagccattaataatagattacgggttgttctcatttttgtaggcatagagcctcctgtagggtttttattaacaacggcttattctaattattttgtgatgagcggcagcgcgtgccgctcaaatattacagttaatagggtttagtgaacgcggttaaaaataaaaggcatcacggtggtgaataatgccgctttcggccaagccggattaatcgccgtcaattcagcgcgagcagactcatattgcgcaacctccccgagtcccgcggacgccagcatcgccaccatcaggcatttttctttatgctgctgttgtaaatcgccatacaggctcaacaagtcaggttggctgacggcaaagaaatccgcttcgatactggttttcgccatctcttgcgcccactgtttcatttcactaaacagttgctgtgcggtttgttgttcgcccagcagtcgcagcgccatcccttgccagaagagataatcaaccggctgatcgttgtaataactgtgaatgttaatagtgcgatcgccggtcgccgccagacgtaaacaacgcgtcgcttcagtttcatcgccctgcgcgttggcgcatatcgcctgccagaaccagatgtcgttatcagtttgccccggtaaacggccttcgcttaaattctccggataatgcagcgcggcatgaagcagttcgcaggcctgctgcggctgtctggcatcaagatgctgccaggcgcgtaataactggttgaggataaactgactggtgaccttcccttccccgccttcccacgggtggaatttgcgcgtggcgagaatgtccgccgctttgtctgcctgacccgtgagatgccacaaattgagcagttctgcggtcatgtcgtcgcgtttcagcgcaatttccagattattttccagacgcgccagtcgtttctccggtgtggctccacttaacttatccagcaaatcccgttcgaaaagcagacgtgcatcctgcggcgcaagctgataagcattatcaagataacgcgcggccagctcataatcgtgttgcttattccacgcatggatcgctaacccgcgccagccgtcggcaaactccgggctcatctctacgcaacgttgccaaaaggcaatggctttgttgtagctacgtttgttgtagtagaagcaagctagtaaatggcgagcaaaccagcactcttcaatactctccagcgccgccacttcttccagcgtattcgggaaacggacaaactgcgggaagacatcaatggcttttgcgaccagttcgccacgttcggctttcggcagcaagctggcttgcaggtaaagcggcagcgtgcgctggcagtccagtgcgttcagcatctctgccgccagggtgggcattccccagttaatcagttgcccggcggtcatcagggcgttaacgtcgcgtccctgacacagaccgcgccactgcgcgagagcactttcgctacgaccatcgaaccagttcagccaccacagagtggcgttcagcggataatcgcgcagcagtttctcgcgctgcacacgcgcgttgtcctgacgaccacttaacaccagcagcagattatgcaggcaaagcacttcctgattggttgggcaggcgcgaagactttgttggcaaaaatccagaccagcgtcgaagttaccattacgcgccgccagtcgtgccaggccataatagccaccggctttgctgttgccgctccagaccgcacgccagaaatcctcttcggcttgttgatattgtccctgacgttcgtaagcactggcgcgaatcaaactcgcctgtccgcactgcggatttttgttcagcgcatgtgcgcgtttcagagcctgagtggcatacgccaccgcttgcgggaaatctgcgcggttatattccagcatcgccagcgccaggttacagcgataatccagcgggtccagcgccacgccgcgcaggtagtaatcgaacggactacggctggcgtgatgatattgctccagatgctgaccgataaaccaggcttcatctgtactggtaatgtcttgtgctgccagtggcgctttggcgacgtccggtaacggcaacgcttgcggctgatgttcctgataactcagtacaatattgccgtcggcatcggagagctcaatggtcagcctttcaggattgataccgtgcaacacgccctggatggcggtcgcaggcatcagtgccacggcatcatcaagtaacgcgttgcatttaccgatttcgcggatcgccaggcggtatccgttcaacggagagatggcatacagcccccactcaatcccccgcttactacgctggagttttatcaccgcatcgcgggaggcattttgcaccatgcccaaagaatgataaggcaggaaatactgctcaaaacgcttctcttcgtaagcatcaagccaggtaaaatcgggctggttatcggcaaaaataccggtcatcagttcgatatacgggccgttattgtcggtcagactcttatcccacgcctggccaaattcactgtgtccccaactccactgttttttacctggcgcaatatggtggttggcaacgtgcagcaaaccgccatcttcatcgtgacaccacgcgccgacaaaatcgtactggcttttttcggccatataactggttggaacaggcacatttttatagcgagaaatgtccactccagcggagtagtccactttgtagtaagtgccggtagcgatggggaaagcggagacggcccgtttgccgtgatcaaacaccgccgttacatccggcgggaagacgctctgatgcccttccccccctttcactgccgggttggcccaccacaagaaatgacgcggcgtggcgttcccgttatagacgcggctggcgatttccagcgccgcccggtcagggcgcagggtgaaacctgtcatcacctgtaaaccatgcatcggctccgtttcgcctacccacaccgtctgtgcaccgtcttcatgggcttcgagggtgaaatcaacgggcataaaggtggtcgggcgatgatgttgcggccagttaaactcaatcccaccggaaatccacggccccagcagccccaccagcgcaggtttaatgacttcattgtgataaacaaaatcgcgctgtttcactttatcccacgcgcgatgcacccgaccgcccagttccggcaggatcatcactttgatgtagtcgttttccagccacaccgcctgccaggatttcagggttttctgctcgctcagcgtatcggtcacgccgtagggataaaccgcgccggagcttccctgataaacgcgattttccaggaacatgggatgtatatcctgcggcccggtttcataggtcgggatctcaacgcgctcttgccacacttttactggagtcatggtgccctcaatattaacaagacatactgaattaaaagatttgtggcagtgtattgaacaatctggcaatgttttcgcggaataatcacgcaattaactaaacaaggtttagtgaagatgagagcctgcattaataatcaacagattcgccaccataacaaatgcgtgattctggaactgctgtaccggcaaaagcgcgccaataaaagtacgctggcccggctggcgcaaattagcattccggcagtcagtaatattttgcaggaactggaaagcgaaaaacgggtggtgaatattgacgatgaaagccagacgcgcgggcatagtagcggtacatggctgattgcgccggaaggtgactggacgctgtgcctgaacgtgacgcccaccagtattgagtgtcaggttgctaatgcttgtttaagtccgaaaggtgaatttgagtatttacagattgatgcaccgacgccgcaggcgctgctgtccgaaatcgaaaaatgctggcatcgccaccgtaaattgtggccggaccataccatcaacctggcgttggcaatccacggtcaggttgatcctgtgaccggcgtgagccaaaccatgccgcaagcgccgtggacaacgccggtggaggtgaaatatctgctggaagagaagctcggcattcgggtgatggtcgataatgactgcgtgatgctggcgctggcggagaaatggcaaaataatagccaggaacgggatttctgcgtgatcaacgttgattacggcattggcagcagcttcgtgattaacgagcaaatttatcgcggcagtttgtatggtagcggacagattggtcacaccatcgttaatccggatggcgtcgtctgcgactgtggacgttatggctgcctggaaactgtcgccagcttaagcgcattaaaaaaacaggcgcgggtatggctaaaaagtcaaccggttagtactcaacttgatcctgaaaaactgactacagcgcagttaatcgctgcctggcaaagtggagaaccgtggatcaccagctgggttgatcgctctgccaatgccattggtttgagtctgtataacttcctcaacatcctcaatattaatcagatttggttgtacggtcgcagttgtgcctttggtgagaactggcttaatactattattcgccagacaggatttaacccgttcgaccgcgacgaaggaccgagcgtgaaagcgacgcaaattggctttgggcaattaagccgcgcacaacaggtgctgggaattggctatttgtatgttgaggcgcagttacgacagatttgatggcgcgataacgtagaaaggcttcccgaaggaagccttgatgatcataaacgaaaaattgcctgatgcgctacgcttatcaggcctacacggagattgcaatatattgaatttgcaaagttttgtaggccggataaggcgttcacgccgcatccggcatgaacaacgagcacattgacagcaaatcaccgtttcgcttatgcgtaaaccgggtaacgtgcgcagatgtcgagaactttacctttgatgcgctcgataacggcttcatcattgatgctgtccagcacgtcacacatccagccagccagttctttcgcttcggcttctttaaagccgcgacgggtaatcgccggagtacctacacgaataccggaggtcacaaacgggctcttcggatcgttcggtacgctgtttttgttgacggtgatgttagcacggcccagagcggcgtctgcttctttaccggtcaggtttttatcaaccagatcaaccaggaacaggtggttatcagtgccgccggaaaccactttgtagccgcgctcgaggaacacttctaccatcgctttagcgtttttagcgacctgctgctggtaagttttgaactcaggctccatcgcttctttcagagcaaccgctttaccggcgattacgtgcatcaacggaccgccctgaccaccagggaaaacggcagagttcagttttttgtacagctcttcgctaccacctttcgccaggatcaggccgccgcgcggacccgccagggttttgtgagtggtggtagtaacaacgtgagcatgaggaaccgggttcgggtagacgccagcagcaaccaggcccgcaacgtgcgccatatcaacgaacaggtaagcaccgatgctgtcagcgatttcacgcattttcgcccagtccaccacgccggaatatgcagagaaaccaccgataatcattttcggcttgtgttctttggcttgtttttccagatcggcgtagtcgatatgaccggtagcatcgataccgtaaggaacgatgttgtacagtttaccggagaagttaaccggagaaccgtgagtcaggtgaccgccatgcgccaggttcatacccagaacggtatcacctggttccagcagcgcggtgtagaccgcaaagttagcctgggagccggagtgcggctggacgttagcgtagtcagcgccgaacagttctttcgcacgatcgatcgccagttgttcaacgatatcaacatactcgcaaccgccgtagtagcgtttgcccggataaccttcagcatatttgttggtcagctgagaaccctgcgcctgcattacgcgcgggctggtgtagttttcggaggcgatcagttcgatgtgctcttcctgacgtactttttcctgctccatagcctgccacagttcggcatcataatcggcaatgttcatttcacgctttaacatccgcatctcctgactcagctaacaataaaatttttggcctttataggcggtcctgttggacaacggcgaacagtataaccgaatcattgtgcgataacaggtcttgacaaaggaatttacgcaaacgattaccttcaggctacgcaaggctttggagaataaagagcttgcaaccggaaacggatttcttttcaggtttgtgatgcaaatttttcacttcatcacattctttctgaaaaacaccaaagaaccatttacattgcagggctattttttataagatgcatttgagatacatcaattaagatgcaaaaaaaggaagaccatatgcttgacgctcaaaccatcgctacagtaaaagccaccatccctttactggtggaaacggggccaaagttaaccgcccatttctacgaccgtatgtttactcataacccagaactcaaagaaatttttaacatgagtaaccagcgtaatggcgatcaacgtgaagccctgtttaacgctattgccgcctacgccagtaatattgaaaacctgcctgcgctgctgccagcggtagaaaaaatcgcgcagaagcacaccagcttccagatcaaaccggaacagtacaacatcgtcggtgaacacctgttggcaacgctggacgaaatgttcagcccggggcaggaagtgctggacgcgtggggtaaagcctatggtgtactggctaatgtatttatcaatcgcgaggcggaaatctataacgaaaacgccagcaaagccggtggttgggaaggtactcgcgatttccgcattgtggctaaaacaccgcgcagcgcgcttatcaccagcttcgaactggagccggtcgacggtggcgcagtggcagaataccgtccggggcaatatctcggcgtctggctgaagccggaaggtttcccacatcaggaaattcgtcagtactctttgactcgcaaaccggatggcaaaggctatcgtattgcggtgaaacgcgaagagggtgggcaggtatccaactggttgcacaatcacgccaatgttggcgatgtcgtgaaactggtcgctccggcaggtgatttctttatggctgtcgcagatgacacaccagtgacgttaatctctgccggtgttggtcaaacgccaatgctggcaatgctcgacacgctggcaaaagcaggccacacagcacaagtgaactggttccatgcggcagaaaatggcgatgttcacgcctttgccgatgaagttaaggaactggggcagagtctgccgcgctttaccgcgcacacctggtatcgtcagccgagcgaagccgatcgcgctaaaggtcagtttgatagcgaaggtctgatggatttgagcaaactggaaggtgcgttcagcgatccgacaatgcagttctatctctgcggcccggttggcttcatgcagtttaccgcgaaacagttagtggatctgggcgtgaagcaggaaaacattcattacgaatgctttggcccgcataaggtgctgtaatttgatgttgccggatggaaacatccggcaacccttgacgcggtttaaattgccgcgtcgtcctcttcaccggtacggatgcgaatgacccgtgccacgtcaaagacgaagattttaccgtcaccgattttgccggtttgcgccgtgcgaataatggtatcgacacaggtatcgacaatgtcgtccggtacgacaatctcaattttcactttcggcagaaaatccaccatatactccgcgccgcggtacagctcggtatggcctttctggcgaccaaagcctttcacttcggtcaccgtcatgccggtaataccgacttcggccagtgcttcgcggacatcgtccagcttgaagggttttataatcgcatcaatctttttcatgctattccttgaaaaggtcgcctgtcttttgatctgctaaacgtaacacataacgccaattcattccttgaaatcgtttgcatccagctcgtgtcgggaaagcagtttataaaattctgtccggttgcgccccgccattctcgccgcgtgggtgacgttgcctttggtgatttgcagcagcttacgcaaatagttgagttcaaactgattacgtgcctcaacaaaggttggcagcgccgtattttcaccctccagcgcctgctccaccagcgcatcactaatcaccggagaactggtcagcgccacgcactgttcaatcacgttgaccaactggcgcacattacccggccagctcgcggtcatcaggcgtttcatcgcatcggtagagaacgcgcggacaaacggtttatgtcgctctgccgcctggcgcaacaggtgatttgccagtagcggaatgtcttctgtgcgctccgccagtgccggaattttcaggctgacaacgttgaggcggtaatagagatcttcgcggaattccccgcgcgccatcgcttttggcagatcacggtgagtggcagaaataatccgcacattgatatcaatatcgcggttactgcccagcgggcgcactttacgctcctgcaacacgcgcagcagtttgacctgtaacggcgcaggcatatcgccaatttcatcgagaaatagcgttccgccttccgccgcctggaataaaccttcgcgattgctgacagcgccagtaaacgcgccacgcgcatgaccaaacagctcgctctccagcaattgctcgggcaatgcgccacagttaatagcaataaatggtttgctgttgcgcgggctggcgttgtggatagcctgggcgaaaatctctttcccggtgccgctctgaccgttaatcaaaacgctgacgtcactttgcgccaccagccgcgcctgttccagcaaacgcagcatcagcgggctgcgggtgacaattgcctcgcgccagcgttcatcggtggctggcgcggattgctccagcgcatcgtcaattgcctgatatagcgcgtctttgtcgacaggcttggtgaggaaactaaaaacgccctgctgtgttgcagcaacggcatcgggaatagaaccatgcgcggtaagaataattaccggcattcccggctgcactttctggatttcagcaaacagctgcataccgtccatttcatccatccgcaggtcgctgatgactaaatctactttttcgcgattcagtacccgtaatccttcagcgccactttccgccgtgaccacactgtagccttcgctggtcaggcgcaggccaagcagtttcagcaatcccggatcgtcatcgaccaataataaatgcgcaggtttatggctcatcaggagtgacctcatgggtggatggcgcgggcttttcactctcgtgcggcgtatccgggctgaaatttccagccggtttgcgggtgctgagctggcgttcaatatcggtcaggttttccagcttgcgggtggtgagttccagttgctgctgtagaacgtgatgttgctggcgcaatgtatccagctcgctgtcgctggactgctggagtttactgtaacgttggcgctcttccgccagttgcagttgcagcgcctgaccatcgcgccagagttgatacagtgggcgaacctgtgccgggatctcggtacttaacgcttcaatacgcgcgaccagctggcggcgctcatacggcgtaattttggcgtcggcgagcaaaatcccttgtttaaaggtattttgccagctgccgtcgtcatattggcgagcttgctgacggctctgcgcaggcattaaacgatcagcacaatccatcgcccgcagccagtaaagcggattggtttcggtacttttaccttgcagcgcccagatgtcgctacattcagtagaaagatagtcagccagttgataaaccggaattttttcttctgctggcgtatcaatggctggcttattgtgattctgcacgcaacccagcaatgccagacatggcagccctgccagccacagccgtcggggcaataatcgttgaaaaatgtgtcgcatattcaccagacttaaagcctatcccagtgggcgtaattgttgcagacagtctggacatggacagcgcggagaaaccggagcgtacatatcgtacgtgaagatttcgagcactgcccggggccgaactgacaaataaaatagcctgataggataggctgttagcattatttcgtgtttttgctgctcggtaattcaatgcggaaacaaacgtcttgcccgctctcgtcgaccagatacagttccccttgcatacggcgaatacaatccctggcaatgcttaatcccagaccgctgcccttcaccgccccttttcgctggtggcttccctgaaaaaagggttcgaagatcatggcgcgttcctcttgcggaatgggcgtgcctgtattgatgacatcaatataaacccgcgcaccatgtaaactgctgcgaaggcaaatgttaccggattcagccccgtagtgcaccgcattggagtaaagattatccagtacgctcatcagcagcattggctccgccaggcaagctgttgctttgagatcgacgtcggtatgcatcattttagcccgtgcgggcaggctatgagcagaaaccactgtctccaccagcggtgctaactcaacattctccagttccaccgcactgtccgcctgtttacggttgtaatcaagcagttgttcgatcagtttttgcaaattgcggctgctgctatcaagaatgctcaccacctctttttgctctggcgtaagcggcccgacaacctggtcagccagtaattcagtgccctcgcgcatactcgccagtggcgtttttaattcatgagataaatgtcttaaaaattgatggcgttgggattccagccaactcaggcgctcacttaaccaaagaatacgttgcccaacgctgcgtaactcgctcggtccactgaagctgacgctattgcccagagaacgcccttcccccagacggttgatcatgcgctcgatatttttcaccggcccgataatcatccgcgtgaaaagcagtaccattaccagactcaccagaaatagcaccaggctttgccaaccaaaatattgcccacgttcggcgatttcacgctgaagctgctgcccacgagagaacaccactgtgcgcgtggcctgtaccatttcggtattggcactggcaaaggcttcaagacgtgcggcggcggcagcatcgggaccgctgttgttacactgaagttgagccagattgtgcaaatcctgacgtaatgcctggtagagtttatcgtccggcagcacgcctgcgtgggcatcgagcatttcgctgtaacgcttgcgctggctttgataaaccttcgccagggttgggtcgtccagcacgcaatactgacggtaactacgctccatctccagcgccgcgttggtcatcgcttcactgcgccgggcatcaataagcgtagtgcggttaaccagcgccgcctgatcgctaagcgcattcaggctttgccaggcttgccatgccagcaccaacaggggcagcagaatcagcaaaaatgccagcattaccagttgtcgtaaactgcggggaaaaacgggccagcgtttcaaggtgttactctcgtcagacgcgaatagcctgatgctaaccgaggggaagttcagatacaacaaagccgggaattacccggctttgttatggaataaggcggtgcctaactcgacgtttcgcccgatggttgatatagctacgctgatatcagaagttggacggcaggcaccttgttgtgcgtcattcgtattttatgtagcacgtcccgaaggggctgacataagtcggtgaatgagccactggttactattatgcagtaactgtgccaataaagaaaatagtttggtaacgtactgattatacgttgctttgaggggtttatgtctcctccgctgtttgaatgtaaatcagccactgtgtcgctaaaaagagacaacttaagataaacttattagataatattaaaatcaatgagttaagtgtcgccagaaagcgacacggcaaaccacccattgtcgtgatttacagacacaaaaaagctcccggagttgggagcttatgatagtggttggtgcttaatgccgcatccgggctgcaaaaccaatgggctgacgacttaccccaactgcttacgcgcattgcggaaaatgcgcatccatgggccatcctcgccccagttttccggatgccaggagttgctgacagtacggaaaacacgttccgggtgcggcatcataatggtgactcgaccactttcagtcgtgactgccgtaataccgttcggactaccgttcgggttagccgggtaggtttcagtgactttgccgaagttatcgacatagcgcagtgccaccagccctttgctttccagtgccgccagatgcgccgcatcacgcacttccacgcgcccttcaccatgagagacagcaatcggcatttggctgcccaccatcccctgcaacagcagagacgggctttgggttacttcaaccaggctgaaacgcgcttcaaagcgatcggaggtattgcgcacaaaacgtggccacaactcactacctgggatcagttcacgcagattagacatcatctggcaaccgttacatacccccagcgccagcgtttgcggacggtggaagaaggttgcaaactcatcgcgtacacggtcattgaacaggatactcttcgcccaaccttcaccggcacccagcacatcaccgtaggagaaaccaccgcacgcgaccagggcgtggaaatcttccaggcccgtgcgtccggtcagcaggtcactcatatgcacgtcgatagcatcaaagcctgcacggtggaaagctgccgccatttcaacatggctgttcacgccctgctcacgcagtacggcaactttcggacgtgcgccagtggcaatatacggtgctgccacatcttcgttgatatcgaagctcagttttacattcaggcccggatcggcgtcgttagatttcgcctgatgctcctgatcggcacactccgggttgtcacgcaggcgctgcatctgccaggtagtttctgcccaccagacacgcaacgtggtgcggctttcgctgaatacagtctgcccgttggcggtaatcacaaaacggtcaccggaaaccgcctgccctacataatggacacaatcagcaagcccatgctgtgccagtacggactcgaccgcttcacggtcagcggcacgaacctgaatcaccgcacccagttcttcgttaaacaacgccgccaggcgatcgtcacccagagtggcgatatccgcgtcaatgccacaatgaccagcaaaggccatttccgccagcgttaccagcaggccgccatcagagcggtcgtgatacgccagcagcttacgctgtgcaaccagcgcctgaatcgcgtcatagaagcctttcagttgcgcgacatcgcgtacatctgccggtttgtcgccaagctgacgataaacctgcgccagcgccgttgcgcccagcgcgttattgcctttgcccaaatcaatcagcagcagtgcgttatcttcggtagaaagctgcggcgtgatggtgtgacgtacatcttccacgcgggcaaatgcagaaatcaccaggctcagcgggctcgtcatttcgcgctcttcgttaccttcctgccagcgggttttcatgctcatggagtctttacccaccgggatcgtcaggcccagcgccggacaaagctcttcgcccacggctttaacggcttcatacaggcccgcatcttcaccagggtggcctgccgccgccatccagttggcggaaagtttgatgcgtttgatatcgccaatttgtgttgcggcgatgttggttaacgcttcaccgaccgccagacgggcagaggcggcgaaatccagcagcgcaaccggcgcacgctcgccaatcgccatcgcttcaccgtagtagctgtcgaggctggcggtagtgaccgcgcagttagcgaccggcacctgccacggccccaccatctgatcgcgcgctaccatgccggttacgctgcggtcgccaatggtcaccaggaaggttttttccgccacagtcggcagatgcagcacacgtttcaccgcgtctgcaatggtgatcccttcacgggccagcgcgtcgcctttcgctttcagcgtttgtacatcgcgggtcatcttcggcgttttaccaagcaggacgtccagcggcagatcgatcggctgattatcaaaatgacgatcgtgcagagaaagatgcagttcttcggtcgcttcaccaatcaccgcgtagggtgcgcgctcacgcttacacagttcgtcaaacagcggtaattgatcggcagcaaccgccagcacgtagcgttcctgggattcgttacaccagatttccagcgggctcatgcccggttcgtcgcttagaatctcgcgcagttcaaatttaccgccgcgcccgccgtcgctcaccagttccggcatggcgttagaaagaccgccagcgccaacgtcgtggataaacaggattgggttggcatcaccaagctgccagcaacggtcgatcacttcctggcagcgacgctccatctccgggttgtcgcgctgtacggaagcaaagtcgaggtcggcatcagactgaccagacgccatagaagacgctgcaccaccgccaagaccgatgttcattgccgggccgccgagaacgaccagcttcgcaccgacgttgatctcgcctttttgtacgtgatcggcgcgaatgttgccgatcccgcccgccagcatgatcggtttgtgataaccgcgcagctcttcgccgttgtggctgttcactttttcttcataagtacggaagtagccgttcagtgccggacgaccaaattcgttgttaaacgccgcgccgcccagcgggccttcggtcatgatgtccagcgcggtgacaatgcgctcaggcttaccgaaatcttcttcccacggctgttcgaagccaggaattcgcaggttggaaacggagaaaccaaccagacccgctttcggctttgcgccgcgcccggtggcaccttcatcgcggatttcaccgccggaaccggtcgccgcgcccggccacggagaaatcgccgtcgggtggttgtgagtttcgactttcatcagaatatgcgccggttcctgatggaaatcgtagcggcccgtttcgtggtcagcaaagtagcggcccacttcagaaccttccattacggcggcgttatctttataagcagagagaacgtgatctggcgtggtttcgaaagtatttttgatcatcttgaacaggcttttcggctgctgttcaccatcgataacccagtcggcgttaaaaattttgtggcggcagtgctcggagttcgcctgggcaaacatatacagttcgatgtcgttcgggttacgaccaagctttgtgaaagcatcctgcagatagtcaatttcatcttccgccagagccaagccaagacgcaggttagcgtcgatcagcgcctgacggccctgccccagcaaatcaacgctggtaaccggagtcggttgatggtgggcaaacaactgctctgcatcatctaaagcaaaaaagaccgtttccatcatgcggtcgtgcagttcagcggtaacctgctgccattgttcattggtcagcgtaccggcttctatatagtaagcaacgccgcgctcaaggcggtttacctgttgtagcccgcagttatgggcaatatcggtcgctttgctagaccagggagagatggtgccaggacgcggggtcaccagcaggagtttgccttgcggggcgtggctggcgagtgccgggccatatttcagcaggcgttcaagttgtgcgtgctcatcatcgtttaacggcgcattgaggtcagcaaaatggacatactcggcgtaaatattgtgaaccgggagcctggcagcctgaaaacgtgccagcagtttgttgattcggaatgcgctcagtgcagggctaccacgcagaatttccatcataagtctctcgtcttctaagctttcggtgtacccaagggggggaaacgggcgtcattataaagaatctgatgcgctgacgaaaccgtttgcgtggaaataaaatcaccatcgtgaattagcaacgcgtgccgccaatggctgtaataagttgccatctggcgcaggtttacgcaaaatgccgctcatttatgagtaaacctttcactattattacgttttttcaagctgggacgcgcacgacacagagaattaactaattgaaaaaattaaagattaattatctgttcatcggcattctggcactgctgctcgcggtcgctctctggccatccattccctggtttggtaaagccgacaaccgtatcgccgccattcaagcgcggggagagttgcgtgtgagcaccattcatactcccctgacttataacgaaatcaacgggaaaccttttggcctggattacgaactggcgaaacagtttgccgattacctcggcgtaaaactgaaagtgaccgtgcggcagaatatcagccagctgtttgacgaccttgataatggtaacgccgacctgctggcggcaggacttgtctataacagtgagcgggtaaaaaattatcagcctggccctacctattattccgtgagtcaacaactggtttataaagtgggtcagtatcgcccacgtacgctgggcaacctgacggcggagcaactcaccgttgcaccgggtcatgtggtggttaacgatctccagaccctgaaagaaacaaaattcccggaattaagctggaaggtagacgacaaaaaaggctctgcggaattaatggaagatgtcatcgaaggaaaactcgattacaccattgctgattctgtcgccatcagcctgtttcagcgcgttcacccggagctcgccgtagcgctcgatatcaccgatgaacaaccggtgacttggtttagcccgttagatggcgataataccctttccgccgccctgctcgacttcttcaacgaaatgaatgaagacggtacgctggcacgcattgaagagaaatacctggggcatggcgatgattttgattacgtcgatacgcgcacatttttacgcgccgtcgatgcggtactgccgcagttaaagcccctgtttgagaaatacgccgaagaaattgactggcgtttgctggccgctattgcttatcaggaaagccactgggatgcacaggccactagtccgacgggtgtgcgcggcatgatgatgttaaccaaaaataccgcgcaaagcctcggcattacggatcgtaccgatgccgaacagagcatcagcggtggcgtgcgttatttgcaggatatgatgagtaaagtgccggaaagtgtgccggagaacgagcggatctggtttgccctcgctgcgtacaatatgggctatgcgcatatgctggatgcccgcgccctgacggcaaaaaccaaagggaatcctgacagttgggctgacgtaaaacagcgtctgcctttacttagccagaaaccctattacagcaagctgacttacggctacgctcgtggacatgaagcctacgcttatgtcgaaaatattcgtaagtatcagattagcctggtgggttatctgcaagagaaagagaagcaggctacagaagcggcgatgcaactggcgcaggattatccggcggtaagccctacggagttgggcaaagagaaatttccttttctcagctttctttcccagagcagtagtaactatttgacccattctccctctctgctgttttccaggaaagggagtgaagagaaacaaaattaatccgtgctggattgcgcttttttctgcgctttaatttcctggcggcgcatgcgaaagaagtcactgagcaacgccgcgcactcatccgccagtattccttccgtaatttccactcggtgattcatacccggatgatgcagcacatccattaaagatcccgcagcgccagttttcgcgtcacgcgcaccaaagaccacgcgaccaatgcgactgtggatcatcgctccggcacacattacacatggttcaagcgtgacatacaacgtggcgtcgatcagacgataattttgcatcaccagaccaccctgccgcagggccatgatttctgcatgtgcggtgggatcatggcgaccaatcgggcggttccagccttcgccgattacccgattgttatgcactaataccgcgccgaccggcacttcccgctcatcccaggcacgtttcgccagcgtcagcgcgtgacgcatccagtattcgtggctaaattcgacttcagacaaaaagaaaactccggttataaaagcgcggcgcattatacacggacgctatgctttactttattccagttgctggagttcaccgcgcggggttactcgccaacgatgctgacagaaataaagcagcggattgtcctgattactgtcgctatagccactgtacagccgcagcggagtgccgattttgcgctccagttgtgcgaccttttcatgtcccagacaacgcatcgtcaatacccaaccaccatagccacgctgaatttggctggcgataagattaacccgcggcagccagggcgtatcgaaataaaccgcttcaaccagcggctgcggagagccggtaatcaaccagatatcagcatcggaacttaacaggtaggtggttaatcgctcctgaaccagcggaaaggcggtaacattgtcgcgaaaccagcgcacgaaatcggcctgcaacgtctgtaaacgtgcttcgctgtgaccaaaagtgcacccccacagaagcagactcatcggccagcgtgccgcacgaccttttatcaataacgcaatggctataatcggtaacaacggcaggacaagtaacgcattcagcggttggcgacgtagtaaatagcgcagaaaactgccgaacatatcctgctgatgcaatgttccatctaagtcaaaaaacaccacacgacgctcgtgagttgccaaaccatactcctctggactgaaacatcctgattaattttcgctactacatagcctaacagatagatcatcacttttccggcaacaatcgaccgcatcatggctaactggaatttttaattcatggcaattagcggcaatggaatataaaattcactcgcgtgtgtctcatattgcctgttgtcgccactatttcatcgcgaggaaagatatgaacggcttacttcgtatccgtcagcgttaccaggggcttgcccagagtgataaaaaactggcggattatctgctgctacaacctgatacggcgcgccatttaagctctcagcaactggccaacgaagccggagtcagtcagtccagcgtcgtgaagttcgcgcaaaaactcggctataaaggttttccggcgcttaagttggcgttgagtgaagcgctggcaagccagccggaaagtccctccgtgcccattcataaccaaatccgcggtgatgatccgttacggctggtcggcgaaaaactgattaaagaaaatactgccgctatgtacgcaacgctaaacgttaatagtgaagagaaactgcatgaatgcgtaacaatgttgcgctctgcgcggcggataattctgaccggtattggcgctagcggtctggtggcgcaaaactttgcctggaagctgatgaagattggcttcaatgctgccgcagtgcgcgatatgcatgcgctactcgcaacagtacaggcgagctcccctgacgatctgttattagccatttcctacaccggtgtacgacgcgagttaaacctggcggcagatgagatgctgcgagtgggcggaaaagtgctggcgattaccggctttactccgaatgccctgcaacagcgtgcttctcattgcctgtataccattgccgaagaacaagcgacaaacagtgctagtatctctgcttgtcacgctcagggaatgttaacggatttgctgttcattgcgctgattcagcaggatctggaactggcaccagaacgtattcgtcatagtgaagcgctggtgaaaaaactggtctgagtaaagaatgcgcgtataatgcccgcccggtttgtgttgttttgagagtttccttatggcgttgttaatcactaaaaaatgcatcaattgtgatatgtgtgaacccgaatgcccgaatgaggcgattagtatgggagatcatatctacgagattaacagcgataagtgtaccgaatgcgtagggcactacgagacaccaacctgccagaaggtgtgcccgatccccaatactattgtgaaagatccggcgcatgtcgagacagaagaacagttgtgggataaatttgtgctgatgcaccacgcggataaaatttaatattctactctggaagtagagtattaattatattactgggaagccttaacgccattatatttatttaattgatgacattagcataatcattcactaagttaatttatatagtatctgcccagacacttatttatagttattaaaggtgcgtccgactggttcaccggacgcaccttaagtacgtttccttgtgttataagaacagaaggatcagctgtaaaacagcaatgatgattttgatgacccgtttaatcaggtatcggcaatcagtcattcgtttttccttaaacaaggaatgcagccattcagattagcccttacatctccccaaaactgaacgtgcgagttattgagggtgcatgctgcactccacaccagagctttgacgacaccactcgtttcaatgggggaattctgtggcatggtgtaaagcacagcaaaatcttcaataacgaagccaattttaatgtacttacgaattggcggtcacgttaatctttccatcaatattgctttcttcgtaaaggctcgagtttttatgctaaagattgcaagttgcttgtaaaagataagtacactgatccataatcgctgttgttgagggtgcatgctgcacaaaattaaagttaaaaagtaaaacccccgttccttaccagttcgggggttttactttttaaagagaacggtattatttttaactttcaataattaccgtggcacaagcatagtgccgctcatctgccagcgttacatgcatatttgcaacgcccagcttttccgccagttttaatgcctcgccccatagccgtagccgtggtttgccgagctcatcattgaatacttcaaattgattaaacgccagaccattgcggatcccggtgccaaacgcttttgctgcggcttctttcacagcaaaacgcttcgccagaaaacgcaccggctggtggtgcgttttccagatagcccattcgttatcgcttaatacgcggcgtgccaggcgatcaccggatcgggcgatcaccgcttcgatgcgagcgatctccacaatatccgtgcctaaacctaatattgccattagccacgcgcttccagcatcagacgcttcatttctgccaccgcatctttcagtccggtcatcactgcacgaccaataatggcatgaccgatattcagttcatgcatctcagggatggcggcaatggctttcacgttgtgataggtcagaccgtgtccggcgttaactttcagaccgaggcttgcggcaaaggtcgcggctttggcgatacgcgccagctcttgcgcctgttcggcgtcagttttggcatcagcatagcaaccggtgtggatctcgataaacggtgcgccaacctctgccgcagctttgatctgctcttcatcggcgtcaataaacagagaaacctgaatcccggcatctgccagacgtttgcaggcatcgcgcattttgtcacgctgccctgcgacatccaggccgccttcggttgttacttcctgacgcttttccggtaccaggcagcaaaaatgtggcttcgtctcaacggcgatcgccagcatctcttcggtcaccgccatctccagattcatgcgggtatccagcgtctgacgcaggatgcgcacgtcgcggtcagtaatgtgacggcgatcttcacgtaaatgcacggtaatgccgtccgctcccgcctgctcggcaataaacgcggcctgcaccggatccgggtaagcggtaccgcgcgcgttgcgcagcgtagcgatatggtcaatgttgacgcctaacagtaattcagccatgacaatcctcatcattcataatgtgttttcaccgttcgcttaggcataaactgccggaacagttccctgctctttaaaggtttaccgccaagatacggcttaagcgccatgcgggtaaagcgtttcgcggcgcgcagtgtgtctgcgtcaggaaattcccgtgcgtttaacgcttttaactgccttccggtgaacgttttattgtcgataacgacgcttgcgataaaccctttttcttcgcgataacgatacgtcatggtgtcatctaccggctcgccgctacccgcacaatgggtaaaattgacgccataacccagatgcccgagcagtgccagttcaaagcggcgcagcgcgggttctggcgtaccagtgacccctgcaagagactgaatgcagtgcaagtaatcgaaaaaaagttcagagaagcgcgtctcgtattccagtacgcgggagagaagttcgttgatgtacagaccgctgtaaagcgtgataccgcttaatggcagcgccaggctgacggcttcagcactgcgcagcgttttgacttcgccacgcccgccaaaacgtagcaagagaggggtgaaaggctgtaatgcacctttcagggtagagcgtttagagcgtgcgcctttggcaaccagacgcacgcgcccgctttcctccgtgaagacgtccagcatcaggctggtttcgctccacgggcgactatgcaggacaaatgcgcgctgccagccttccatcggagttactcttaaagatcgtcaacgtaaccgagactgcgcagtgcgcgttcgtcgtcggcccaaccggatttcacttttacccacagttcaaggtgaacaggcgcttcgaacatttcctgcatgtctttacgcgcttcaatcccgatggttttgatcttggcccctttgttgccaatgaccatcttcttctgcccttcacgctcaacgagaatcaaaccgttgatgtcataaccaccgcgttcgttagagacgaaacgttcgatctccacggtcacggagtacggcagttcagcgccgaggaaacgcatcagtttttcgcggatgatttcagacgccataaaacgctgactgcgatcggtgatgtaatcttccgggaagtgatgagtcgcttcaggtagatgcttacgcacgattgccgcaatagtgtcaacattcagcccggtttcggcagagattggcacgatatcgaggaagttcatctggcttgccaggaactgcaggtgcggcagcagatcggctttctcctgcacgttgtccactttgttcaccgcgaggattaccggcgctttgccttcgcgcagtttgttgagcaccatttcgtcgtccggcgtccagcgggtgccttcaacgacaaaaatcaccagctcaacatcgccaatagagctgctcgccgctttgttcatcaggcggttaatggcgcgtttttcttccatatgcaggcccggtgtatcgacgtagatcgcctgatacgcgccttcagtatggatccccacaatgcggtgacgagttgtctgcgccttgcgggaagtgatggagattttctgccccagcagtttgttcaacaatgtggatttgccaacgttcggacgtccgacgatggcaataaatccgcagtaacttttatcgatgctcattccagctccagttttttcaacgcctgttcggcggcagcctgctcagccttacgacggctactacctgtgccaaccaccggttcactcaggccgctgacctggcagtggatagtaaattcctgatcgtgcgcttcgccacgtacctggactaccagataagtcggcagcggcagatggcgaccctgcaaatattcttgcaagcgcgttttcggatctttttgtttatcgcctgggctaatttcgtccaaacgagtttgataccagttgaggattaatttctcgacggtttgaatatcactgtcgaggaatacgccaccaattaatgcttcgacggtgtcggcgagaatactctcacgacgaaatccaccgcttttaagttcacctggccctaaacgtaagcactcgcctaactcaaattcgcgcgccagttccgccagcgtattgccacggaccagcgtggcgcgcatccggctcatatcgccttcatccacacgagggaaacggtgataaagcgcattggcgataacgtagctcagaatagagtcgcctaaaaattctaaacgctcgttatgtttactgctggcactacgatgagttaatgcctgctgcaacagttcctgatgattaaaagtgtagcccagcttccgttgaagccgattaattacgatggggttcatgcgataccaataaataaatgcgtcaacaattcagcacacgaaacagacctgatatacatggttctgctaactgcttcgctgcagtttcagtttaccggtatatggggaccaacgctgtttcgtgtgccgtggcaacctggaggtgccaaccttaaacttcgggggaatattctatacacaacgacgggggatgtcgttagccacgggagatttatctcataaataattcacgttgtcgccataacggcgacaacgtgaacgaagatggctattaatggatgccgccaatgcgacttaagcgcagaccagtcggccattcgccttcttgcttatcgaagctcatccagatagccgttgcccgaccgaccagattcgcttccggcacaaagccccagtaacggctgtccgcgctgttgtcgcggttgtcgcccatcatgaagtattgtcccggaggaacaatccaggttgccagttgttgccctggctgctggtaatacatccccacctgatcctgcgcaatcggcactgtcagaatgcggtgcgtcacatcacccagtgtctctttacgctcggaaagacgaattccattttctttggtttcgtttttcggcacttcaaagaatccgctggtcgcttccccaccattacggcgactgaaggtctgaacgaaatcgctcggttccacgttactgtaggtgaccggcagcgcgttttcacacgcctggccggaactgcatcccggttgaatcgtcagctctttactgaccggatcgtaagtgactttatcgcccggtaaacccaccgcgcgcttgatgtaatcaagctttggatcttccggatatttaaagaccacgatatcgccgcgtttcggatgaccggtttcgatcagcgttttctggtagataggatctttaatgccataagcaaacttctctaccagaataaaatcaccaattaacagagtcggcatcatgctaccactcgggatctggaacggttcataaataaagctacgcacaatcaatacgatagccagtaccggaaaaacagaagcaccggtttccagccagccaggcttcggcgcaacctttttcaacgttgctttatccagactgtccccggcagccgcctgcgccgctgcctgacgttcccgccgtttaggtgcgaaaaagaatttatccacgcaccataaaatgcccgtcaccagtgtggcaatcaccagaatcagggcaaacatattcgccatgccaactcctaagggttatttgttgtctttgccgacgtgcagaatggcgaggaacgcttcctgcggcagctcgacgttaccgatctgcttcatgcgtttcttaccttctttctgcttctgcagcagctttttcttacggctgatatcgccgccataacatttagccagtacgtttttacgcagctgtttcacggtggatcgcgcaatgatgtgcgtaccaatcgctgcctgaatggcgatatcaaactgctggcgtgggatcagatctttcatcttctccaccaactcgcgaccgcggttttggctattatcacggtgggtgatcaacgccagcgcatcaacacgttcaccgttgattaatacgtctacacgtaccatgtcggacgcctggaagcgcttgaagttgtaatccagagacgcataaccacggctggtagatttcaggcgatcgaagaagtcgagcaccacttccgccatcgggatctcgtacgtcagcgccacctgattaccgtggtaaaccatattggtctgcacgccgcgtttttctacgcacaacgtaataacgttgccgagatatgcctgcggcagcagcatgtgacactctgcaatcggctcgcgcagttcgtagatgttatttaccgcaggcagcttggatgggctgtcgacgtagataacttctctactcgtggtttcaacttcatacactacggtcggcgcagtggtgatcagatccagatcgtattcacgttccagacgttcctggatgatctccatgtgcagcaggccgaggaagccgcagcggaaaccaaagcccagcgcgctggagctttccggctcatagaacagactggcatcgttcaggctgagtttacccagcgcgtcacggaaggcttcatagtcgtcggaacttaccgggaacagaccggcgtatacctgcggtttgactttcttaaagccaggcagcgccttttctgccggattacgcgccagcgttaaggtatcgccgactggagcgccgtggatatctttaatcgcacatacgagccagcctacttcgccacatttcagttcagtgcggtcaacctgtttcggcgtgaagatgcccagacggtcggcgttataggtctgcccggtactcatgactttcactttgtcgcccttacgcagggtgccgtttttaatacggataagactaacaacgcccaggtagttgtcgaaccaactgtcgataattagtgcctgcaacgggccttccggatcgccttccggcggcggaatgtcgcgcaccagacgttcgagaacgtcctgcacaccaacgccggttttcgcactacagcgcaccgcgtcggtggcgtcgatgccgacgatatcttcaatttcttccgccacgcgttcaggatcggctgccggcaggtcaatcttgttcagtaccggcacaacttcgagatccatttccatggcggtgtagcagtttgccagggtttgcgcttctacgccctgcccggcgtcgaccaccagcaatgcaccttcacaggcagccaggctacgggaaacttcataggagaagtctacgtggcccggggtgtcgataaagttaagctgataggtttcgccgtcagacgctttgtagtccagcgtcacgctttgcgctttgatggtaatgccacgctcacgctcaagatccatggaatcgagaacctgcgcctccatttcacggtcagacaggccaccgcagatctggataatacggtcagacagcgtgcttttaccgtggtcaatgtgagctatgatgctaaagttacgtatattcttcataaagtatgattattgtgccttaatgcccggttaaccaggcttttagaagtcgctgttctgagcttaacgtctgtattaatagaaacgccgcattctacactacaacattgaggcgaggaaatgttcataccgtatggattgtggtatctggaaacgtcctcgcatttgttatgcaaaatgcaacaaagccagtgaaatcactggctcgcgtcttcgctagatgtttcaaatcgcacaaggccaggcggcaatgccacgcttaagatgatcggttgccattctgcccgggcagcaaacttacggctgtagccgcgcgcaatcaggaacccgccaataccaccgaggatcgcaccacataatgctgcgacgtcagaagcaaagagtagctgaaataggctagcgataaggaataatcccaccagcgggctcatataaaccagtaatgcggagctaagcaggctgccttcggcgatccccaattccactttttgccccggcactaacggctcatcacagggtacgacaatggtatgcgtggtttgcgggccaagtttatttaacacgcggctaccgcaaccggcgcgactagcgcagctgctgcaactagctttaacatcacaactgaccagcgcctgcccgttttgccaggagacgacggtagcccactctttgatcattgcgctgccccgaacttaatattctcggcaatgcgtttcgccgtttgcggcggcagttcaccgacaatggtgatttcggcgttatcacgtacgcttgtactgacggttctgcgtccggtgcgcaacatctgatcggtgctgcttggcgtagcgcggttaacgtttacgctgaagctgaataatccgtcggaatagagacgactttcgataggcatgttgtccatcgtcggtagcggacgtcgactactggaaacttcgctaaaaccctgtggcaaccaggttggcgtccagctgaatttagctttttcacctacaggaacagaaagcaacggcggcaaatttgccttcgccagcgtctgcatactgctgctgatatcctgattgacgttaaaagcaatcacgcgaaattgttccagcgtttcaccatcgcgatcaaggagatcaacccgcatcggtaatttgctttcggtgtccatccacacgatgtagctgtagcgtgtaccatctcgggcaaccacgcgaatgacttcgcaaagacgatcagcaatacgcgtgcgcccgacggagataaagtcgtagtaaggagaaaggcgtttgaaatcggtatagataaggcttggcagagaatcaacaatgtaatcgccattaagcgtgaacggttcaagtcccggttcaaaatagctgatttcattgccgcgctgtaccacttcccggcgcgggccatccatttgcaacaattgtgcaagaggacggttatcgaggcgtgcatgtcgataacgcagagactcaacaccctgtttattgatgctgatgaaactcagctcgtaattcagactctgactggccaggttcatctgctgtaataacgccccggacgcgggagtggcgctggcgttagcagagaataacaggctacctgtcactaaactcatggcaaaccaaagttgcttcattactggctttgcgttcctaaagtttgaattcctggcacctgtacagcggcttgctgggtttgcgcctgctcaaactgaagctgttcagagtggagtcggcgttgcagttcgtaatcctgcaacattgcattaatgcgacgacgctgctcctgtacctgctgctgttgaccattgtttgcggtcgcttcagaaggtactcccaggcttaccgggctggctttacccatcatcggcagtgtattaaataccggcgtttcgggctgctgggacgtttcagattgtccattatagtgctggacgccaacgataactgcaaggcttacgcatgcggctacgcccatttgggtaagctgtgccgcccacggacgtactttctgccagaatggcattttctgccattgatgcggcgcaggctgggcttccgggatcaatgtcgccggttgacgtactggctcttcttcaatggcggccatcacgcgactagagatatcgaaatggagcacctcgggagtatcaccccgcatactgtcacggattaagtgatagctttcccaggttttctgcatttctgggttatgagccagttcgttaagcagctcactatccagcgtttcgccatccattaaagcggaaagttgttctttctgcatgcctaatacccttatccagtatcccgctatcgtcaacgcctgataagcggttgaactttgttatcaatagcttccctcgctcggaagatacgactacgcaccgtacctaccggacaatccatgatagcggctatctcttcatagctcaggccatccagctcccgcaaggttattgccatgcgtaaatcttccgggagggactcaatagttcggaaaactatctgtctcagttcttcactcaacattaagttctcagggttgctaatttctttcaacgcgccgccactttcgaagttttcagcttcaatggcatccacatcactggaaggtggacgacgcccctgagcaaccaggtaatttttcgctgtatttacagcaatccgatacagccatgtataaaaagcgctatctccccggaagctatccagcgcacgataggctttaataaaagcttcttgtaccacatcgggaacatcaccgctcggcacatagcgggaaaccagactcgccactttatgctgatagcgcactaccagtaagttaaaggctttctgatctcccttctggacccgttcaaccaggacctggtccgttaactgctcgctcatccgaggtaaagtctccccaaaccaaatttccacgcgctatcgaaacgccactccattagctgcaatttgagcaagcaaagggttagagtgtctcgtttttgtaaagttccgtaacgcatctgtttttgtttgtcatgctgtagacggatcattatctatcattataagtctacagaatctgaacatcgcattatctgtgtagaaatgcccatttaactgcctgaagagtaacccaacggcctttttatttcaccacctaatcctccaccagccagtaacttctctttttctcgccgccctgcgtcagcgtgtttagcaactgtaacaaatattaaaatagcaggtgtttatccgcacaacatgatgctatgctgaccaaaccatgtttagtaaattaaacaaagaaaatgaatactctccctgaacatagttgtgacgtgttgattatcggtagcggcgcagccggacttagtctggcgctacgcctggctgaccagcatcaggtcatcgttctaagtaaaggcccggtaacggaaggtagtacattttatgcccagggcggtattgccgccgtgtttgatgaaactgacagcattgacagccatgtggaagacacattgattgccggggctggtatttgcgatcgccatgcagttgaatttgtcgccagcaatgcacgatcctgtgtgcaatggctaatcgaccagggggtgttgtttgatacccacattcaaccgaatggcgaagaaagttaccatctgacccgtgaaggtggacatagtcaccgtcgtattcttcatgccgccgacgccaccggtagagaagtagaaaccacgctggtgagcaaggcgctgaaccatccgaatattcgcgtgctggagcgcagcaacgcggttgatctgattgtttctgacaaaattggcctgccgggcacgcgacgggttgttggcgcgtgggtatggaaccgtaataaagaaacggtggaaacctgccacgcaaaagcggtggtgctggcaaccggcggtgcgagcaaggtttatcagtacaccaccaatccggatatttcttctggcgatggcattgctatggcgtggcgcgcaggctgccgggttgccaatctcgaatttaatcagttccaccctaccgcgctatatcacccacaggcacgcaatttcctgttaacagaagcactgcgcggcgaaggcgcttatctcaagcgcccggatggtacgcgttttatgcccgattttgatgagcgcggcgaactggccccgcgcgatattgtcgcccgcgccattgaccatgaaatgaaacgcctcggcgcagattgtatgttccttgatatcagccataagcccgccgattttattcgccagcatttcccgatgatttatgaaaagctgctcgggctggggattgatctcacacaagaaccggtaccgattgtgcctgctgcacattatacctgcggtggtgtaatggttgatgatcatgggcgtacggacgtcgagggcttgtatgccattggcgaggtgagttataccggcttacacggcgctaaccgcatggccagcaatagtttgctggagtgtctggtctatggctggagcgcggcggaagatatcaccagacgtatgccttatgcccacgacatcagtacgttaccgccgtgggatgaaagccgcgttgagaaccctgacgaacgggtagtaattcagcataactggcacgagctacgtctgtttatgtgggattacgttggcattgtgcgcacaacgaagcgcctggaacgcgccctgcggcggataaccatgctccaacaagaaatagacgaatattacgcccatttccgcgtcagtaataatttgctggagctgcgtaatctggtacaggttgccgagttgattgttcgctgtgcaatgatgcgtaaagagagtcgggggttgcatttcacgctggattatccggaactgctcacccattccggtccgagcatcctttcccccggcaatcattacataaacagataaaaagcctgggtcagcgccgtatacgcttcggaatagttctggtctggcccacgaatgactaagcgatcgctaaagcattctcccgcctgcggggagaatgccagcagcacccgatgcggcagtcgcgcttcgttttccgccacatccgtccgcaaacgtaaatgccagcccatgcttaatgccagctccgtaaaaccattaccaatctgctctggcagcactacgcagaaaaatccctcttcggtaatgcactccgccgcacaggtcagcaagcttgggtgatcaagcgtagtggtatagcgagcctgttcccgttgaggtgtgctgcactctactccctgctgatagtaaggtgggttactgatgattaaatcgaagcgtactgtctgctgtgtgatccactgctgaatatccgccgtatggacgttaatccgctctgcccacggggactggttgatattttcctgcgcctgcgcggcagcttcactttccagttcaactgcatcaatcatcacgctgtcatcggttcgctgcgccagcattaatgccagcaacccgctacccgcgccgatatcaaggcaacgttttaccccagccaccggtgcccatgcgcccaataaaataccatccgttcccactttcatcgcacagcgatcgtgagcaacaaaaaactgtttaaaagtaaatccattacgacgaagcacggatgtagactgactcatgaaaataaaaccttgcaggaaaaacggcgatagcaccgggtgagaacaatacccgagaagcgatatccatacaaacagatgaagattgcagccgtaacgtctataatcagcgccccacacagaggtagaacatgactgtaacgactttttccgaacttgaactcgacgaaagcctgctggaagccctccaggataaaggtttcactcgcccgaccgccattcaggctgccgccattccgcctgcgctcgatggccgtgatgtactcggttctgcgccgacaggcaccggtaaaacggcggcgtatctgctgccagcgttgcagcacctgctcgatttcccgcgtaagaaatccggtccgccgcgtattttgatcctcaccccaactcgcgagctggcgatgcaggtgtccgatcatgcccgcgaactggcgaaacatacgcatctggatatcgccaccatcaccggcggcgtagcctatatgaaccacgcggaagtgttcagcgaaaatcaggacatcgtggtcgccacgaccggacgtctgctgcaatacataaaagaagagaacttcgattgccgcgcggttgaaacgctgatcctcgacgaagcagaccgtatgctggatatgggcttcgctcaggatatcgaacatattgctggcgaaacgcgctggcgtaaacagaccctgctctttagcgcaacgctggaaggcgatgcgattcaggactttgccgagcgtctgctggaagatccggtggaagtttctgccaatccctccacccgtgagcgcaaaaaaattcatcagtggtattaccgcgccgatgatcttgagcataaaaccgcgttgctggtgcatctgttaaaacagccggaagcgacccgcagtattgtgtttgtgcgtaagcgtgagcgtgtgcatgagctggcaaactggctgcgcgaagcgggcatcaacaactgctatctcgaaggtgagatggtacagggcaagcgtaacgaagcgatcaagcgtttgaccgaaggtcgcgtaaacgtactggtcgcaaccgatgttgccgcgcgcggtatcgacattcctgacgtcagccacgtctttaacttcgatatgccgcgcagtggcgatacttatttgcaccgtatcggacgtaccgcgcgcgccggtcgtaaaggcaccgcaattagcctggtggaagcccatgaccatctgctgctgggtaaagtaggccgctatattgaagagccaattaaagctcgcgttattgatgagttacgcccgaaaacgcgtgcgccaagcgaaaagcagaccggcaagccaagcaagaaagtactggctaaacgtgctgagaagaaaaaagctaaagagaaagagaagccgcgggtgaaaaaacgccatcgcgacaccaaaaatattggtaagcgccgtaaaccaagcggaacgggcgtgccaccgcaaacgacagaagagtaatctcaatgccaggtttaagcctggtattaaaagtgctggcaaacgcaaaactgcctgatgcgctacgcttatcaggcctacgtggctcatgcaatatattgaatttgcacgatcttgtaggccggataaggcgttcacgccgcatccggcatgaataaagcgcactttgtcgacaagttaaatgccgggtttaatcccgacattatttttatccagccacaaaactctcttcaacacactgaataaaagtgtgcatcgccgggctaaccgcttttccagcatgatgtgcgcacatggccgtaatggtctggctctgttcgccaaaaggcaattcaattaattctccgcactccaactcttttgccaccgcaaagcgcggtaggtagctgaccccgatattcgccgcgacacaacgcttgatgctttcgatacttataagctcaatggtgttttccaccgtgatccgccgctgacgcagcgtgctctcaaatatctgccggaagacacattgcggttcgttgataataaagctacaggcgttatgtcttcccggctcagtaaaatcgacatctgcaatttgcggactagccaccagcaccagactttgttcacccaactctcgtcgattcagagcatcatcattccctacacgataaaagacgccaacatcggcctcatcattcagtagcgcatcacggatcacgtaacagttcaggctctgcaagcttaaacgcacttttggggcgcgttgccgaaaacgctgcaacacctgcggcattcggtaagagagcaacgtttcgccgctaacaacgcgtagttccccgtccggatcactctcctttttggcagcctcacgaagcgtatccatcactcgggtaagttcataaatgtgcggcagcaacttttttccttcgcgggtaaggcacatccgtcggccaattttctcaaataactggacactaaactcctgctcaagctgctgaatatgaaaagtcaccgtgctttgtgtacagcacaatttttggctagctcgcaaaaaggaaccctcttccaccacggttttaagcgtaataaaacggcgcagatccataaccccaaacctatcgaaaatatcgaatctagaatataaaaacattcatttttttaaatgttccgtgtcgggtactgtctaccaaaacagaggagataacaagtgacaccgacccttttaagtgctttttggacttacaccctgattaccgctatgacgccaggaccgaacaatattctcgcccttagctctgctacgagccatggatttcgtcaaagtacccgcgtgctggcagggatgagtctgggatttttgattgtgatgttactgtgtgcgggcattagttttagtctggcagtgattgacccggcagcggtacaccttttgagttgggcgggggcggcatatattgtctggctggcgtggaaaatcgccaccagcccaacaaaggaagacggacttcaggcaaaaccaatcagcttttgggccagctttgctttgcagtttgtgaacgtcaaaatcattttgtacggtgttacggcactgagcacgtttgttctgccgcaaacacaggcgttaagctgggtagttggcgtcagcgttttgctggcgatgattgggacgtttggcaatgtgtgctgggcgctggcggggcatctgtttcagcgattgtttcgccagtatggtcgccagttaaatatcgtgcttgccctgttgctggtctattgcgcggtacgcattttctattaacgaaaaaaagcggaagaggtcgccctcttccgcttagtaacttgctacttaagccttacaggctttcagtaaaggtacgagcgataacgtcgcgctgctgttccggagtcagagagttaaagcgaactgcataaccggatacacggatggtcagctgcggatatttttccggatgcttaactgcatcttccagagtttcgcgacgcagaacgttaacgttcaggtgttgaccaccttcaacgcgaacttctggtttcacttctactggaacttcacggtattcaatgtcacccagtttgcttactgcaaccacttcatcttctgcataacctgcttttgcaacgatgcaacgcgcttcgcctttttcgctgtccagcagccagaaagagttcagcagatcgtcgttagcggctttagtaatctggatacctgtaatcatgtgatgcctccccggcaaaattatttgatttgttcagcctgtcgcggccaattggtaaaaccattgttgcttgagtgtatatatactcctcaaacacccttgaatctttgatttaaatcaataaaaaccacacatcaagtatggtcgcaaatggattttattgttttacatcaacttatgcgggtgtgaaattttaccaatttacatttttttgcactcgtttaagtctaaaaaatgagcatgattttgttctgtagaaagaagcagttaagctaggcggattgaagattcgcaggagagcgagatggctaacgaattaacctggcatgacgtgctggctgaagagaagcagcaaccctattttcttaatacccttcagaccgtcgccagcgagcggcagtccggcgtcactatctacccaccacaaaaagatgtctttaacgcgttccgctttacagagttgggtgacgttaaagtggtgattctcggccaggatccttatcacggaccgggacaggcgcatggtctggcattttccgttcgtcccggcattgccattcctccgagtttattgaatatgtataaagagctggaaaatactattccgggcttcacccgccctaatcatggttatcttgaaagctgggcgcgtcagggcgttctgctactcaatactgtgttgacggtacgcgcaggtcaggcgcattcccacgccagcctcggctgggaaaccttcaccgataaagtgatcagcctgattaaccagcatcgcgaaggcgtggtgtttttgttgtggggaagccatgcgcaaaagaaaggggcgattatagataagcaacgccatcatgtactgaaagcaccgcatccgagcccgcttagcgcgcatcgtggattctttggctgcaaccattttgtgctggcaaatcagtggctggaacaacgtggcgagacgccgattgactggatgccagtattaccggcagagagtgagtaaatttgcggggaaatgccggatggcagagttgccacccggctgatttatcaggctttattctgacgccaccattcaccaagcaaaacgccggttgcgacagagatattcagcccggcaacgttgcccgtaccgtcaatcttcacgcgcagatcgttcggatcgcgtgcggcatccggtaacccttcatattcctgacccagcaccagtaccattttcgctggcagactagttttgaacagcggtttaccctgctcgctggaagtggtcactacggtgtaacctgcctgacggaaatcatccagcacgttaacaatgttgtcgccagtaatcggctgaacgtgctctgcgccgccttctgcggtacggatagccgccccgctctccagcagtgccgcatcctgcaccacgacacctttcacgccgaagtgcgcgcagctgcgcatcatgccacccaggttatgcgggttagattcgttttccagtgccagaacgcaatcctgcgcgcctgcctggcttacccactgctgcacggttgtaccgttacgctttttgatcaagaagcaaacgccgccgtgatgttccgtgccactcgcttttgtcaattccgcttcatccaccacatggtacgctttgcggtttgctgccatccagcgcaaagcttctttaaaacgcggcgttacactctggataaaccaggcgcgaacaatcgcttccggacggctctggaaaagtgcctgacatgcattttcgccgtagacgcgggtttcttccgcacgctgacgacgcaacacttccggatcaataaaacttttaccactgatgccaccgtgatcggccttttccggcgtctcatcacccggcgcgcgggaaaccgtgcgccacgggctatcttcccacttgcggtcacggggctgactctgtttgtcatcgcgggcggggcgacggccaccgtcagcacgagattttcctggacgcccgccccctttcccggtacgcgggttgtgggtacgtttatcagaatcatcatcactgcggacatacatcactttgaccttgccgcttttacctttcatttcatcgttcatgcttttctccaccagcgctgcgcgaagcgcgcagattacccgaagtccgcgcggttcgccatgatttcgtaccaaagcctgcgactatcatacctattgaataaaacagattgttgtctggaacaatgtccccgataatatgtaacatattagaaacataccggcgtcgttgccgataagtctccttactcatcccgaggttagttatgaataccgtttgtacccattgtcaggccatcaatcgcattcccgacgatcggatcgaagatgcggcaaaatgcggacgctgcggtcacgacttgtttgacggagaggtgattaatgcgaccggtgaaacactcgacaaattgctgaaggatgatctacctgtggtgatcgacttctgggcaccgtggtgcggcccctgccgtaatttcgcaccaatttttgaagatgtcgcgcaagagcgtagcggtaaagtgcgctttgtgaaagtgaataccgaagctgaacgtgaattgagcagtcgctttggaattcgtagtataccgacgatcatgattttcaaaaacggtcaggttgtcgacatgcttaatggcgcagtaccgaaagcgccgttcgatagctggctgaacgaatctctttaatcttaccggggcgcatcttgtgccccgttttctcctctgcgacaatggcgttttttcgacgctctcttatgaccgaaaacgctgttctccagttacgcgccgagcgtattgcgcgcgcaacacgtccttttcttgcccgcggtaatcgcgttcgtcgctgccaacgctgtcttttgccagagaaattatgtctctgtagcacaattaccccagcacaagcaaaaagtcgcttctgtttgctgatgttcgacaccgagccaatgaagcccagtaataccgggcgtctcattgctgatattttgcctgataccgttgcgtttcaatggagccgtaccgaacccagccaggatttgctggagttggtgcaaaacccggactatcagccaatggtggtctttcccgctagctatgctgatgagcaacgggaagtgatcttcacaccacctgccggtaagccaccgctgtttatcatgctcgatggtacctggccggaagctcgcaagatgtttcgtaaaagtccgtatctggataatcttcccgtcatttccgtcgatctttcccggctttctgcctatcgcctgcgtgaagcccaggctgaaggccaatattgtactgccgaggtagccatcgcactgttagatatggccggcgataccggggcggcggcagggttaggcgagcattttacccgctttaaaacacgctatctggcaggaaaaacgcaacatctgggtagcatcacagcagaacagttagaaagcgtttaaaatcattcggtcacttctgcgggagaccggtatgagtcagcgaggactggaagcactactgcgaccaaaaagcatagcggtaattggcgcgagcatgaaacccaatcgcgcaggttacctgatgatgcgtaacctgctggcgggaggctttaacggaccggtactcccggtgacgccagcctggaaagcggtgttgggtgtgttggcctggccggatattgccagcttgccctttacacccgaccttgcggttttatgtaccaatgccagccgtaatcttgctcttctggaagagctcggcgagaaaggctgtaaaacctgcattattctttccgccccggcaagccaacacgaagatctccgcgcctgcgccctgcgccataacatgcgcctgcttggaccaaacagtctgggtttactggctccctggcaaggtctgaatgccagctttagccctgtgccgattaaacgcggcaagctggcgtttattagccaaagcgctgccgtctccaacaccatcctcgactgggcgcaacagcgtaagatgggcttttcctactttattgcgctcggcgacagcctggatatcgacgttgatgaattgcttgactatctggcacgcgacagtaaaaccagcgccatcctgctctatctcgaacagttaagcgacgcgcgacgctttgttagcgcggcccgtagtgccagccgtaataaaccgattctggtgattaaaagcggacgtagcccggcggcacagcgactgctcaacacgacggcaggaatggacccggcatgggatgcggctattcagcgtgccggtttgttgcgggtacaggacacccacgagctgtttagcgcggtggaaacccttagccatatgcgcccgctacgtggcgaccggctgatgattatcagcaacggtgctgcgcctgccgcgctggcgctggatgccttatggagtcgcaatggcaagctggcaacgctaagcgaagaaacctgccagaaactgcgcgatgcactgccagaacatgtggcaatatctaacccgctcgatctacgcgatgacgccagcagtgagcactatattaaaacgctggatattctgctccacagccaggattttgacgcgctgatggttattcatagccccagcgccgctgctcccgcaacagaaagcgcgcaagtattaattgaagcggtaaagcatcatccccgcagcaaatatgtctctttgctgacgaactggtgcggcgagcactccagccaagaggcacgacgtttattcagcgaagccgggctgccgacctaccgtaccccggaaggaaccatcactgcttttatgcatatggtggagtaccggcgtaatcagaagcaactacgcgaaacgccggcgttgcccagcaatctgacttccaataccgcagaagcgcatcttctgttgcaacaggcgattgccgaaggggctacgagcctcgatacccatgaagttcagcccatcctgcaagcgtatggcatgaacacgctccctacctggattgccagcgatagcaccgaagcggtgcatattgccgaacagattggttatccggtggcgctgaaattgcgtagcccggatattccacataaaagcgaagttcagggcgtcatgctttacctgcgtacagccaatgaagtccagcaagcggcgaacgctattttcgatcgcgtaaaaatggcctggccacaggcgcgggtccacggcctgttggtgcaaagtatggctaaccgtgctggcgctcaggagttgcgggttgtggttgagcacgatccggttttcgggccgttgatcatgctgggtgaaggcggtgtggagtggcgtcctgaagatcaagccgtcgtcgcactgccgccgctgaacatgaacctggcccgctatctggttattcaggggatcaaaagtaaaaagattcgtgcgcgcagtgcgctacgcccattggatgttgcaggcttgagccagcttctggtgcaggtttccaacttgattgtcgattgcccggaaattcagcgtctggatattcatcctttgctggcttctggcagtgaatttaccgcgctggatgtcacgctggatatcagcccgtttgaaggcgataacgagagtcggctggcagtgcgcccttatccgcatcagctggaagaatgggtagaattgaaaaacggtgaacgctgcttgttccgcccgattttgccagaagatgagccacaacttcagcaattcattagccgagtcaccaaagaagatctttattaccgctactttagcgagatcaacgaatttacccatgaagatttagccaacatgacacagatcgactacgatcgggaaatggcgtttgtagcggtacgacgtattgatcaaacggaagagatcctcggcgtcacgcgtgcgatttccgatcctgataacatcgatgccgaatttgctgtactggttcgcagcgatctcaaagggttaggcttaggtcgacgcttaatggaaaagttgattacctatacgcgagatcacggactacaacgtctgaatggtattacgatgccaaacaatcgtggcatggtggcgctagcccgcaagctcgggtttaacgttgatatccagctcgaagaggggatcgttgggcttacgctaaatcttgcccagcgcgaggaaagttgagtaaggtactggaaatgttgaccacttaatcgggactggtgttattattgcccgcttatgtcgtctgcattgcacagaggacccttcaatgaacagagaagaaatgcactgtgatgttgagtaaatttaagcgtaataaacatcaacaacaccttgcccaactacccaagatttctcaaagtgttgatgatgtcgatttcttttacgctcccgccgacttccgggagacgctgctggaaaaaatagccagcgcgaagcagcgcatttgcattgtcgccctgtatctcgaacaggatgacggtggcaaaggcattctgaacgcgttgtatgaggctaaaaggcagcgtccggaactggatgtgcgggtgctggtcgactggcatcgtgcacaacgtggacgcattggcgctgcggcatctaacactaacgctgactggtactgccgcatggcgcaggaaaatccgggcgtagatgttccggtttatggcgttccaatcaatactcgtgaagcccttggtgttctgcactttaaaggctttatcatcgacgatagcgtactttatagcggtgccagcctgaacgatgtttacctgcatcagcacgataaatatcgctacgaccgttatcatctgatccgtaaccgtaagatgagtgacattatgtttgaatgggttacacagaatattatgaatggccgcggcgttaatcgtctggatgatgttaatcggccaaaaagcccggaaatcaagaacgatattcgtctgttccgccaggagctgcgtgatgccgcttatcatttccagggcgatgccgacaacgatcagctttctgtaacgccgctagtggggctggggaaaagcagtctgttgaacaagaccattttccatcttatgccttgtgccgagcagaaactaaccatctgtacgccatacttcaacctgccagcaatccttgtgcgcaatattatccagttgctgcgcgaagggaaaaaggtcgaaattattgttggtgataaaaccgcgaatgacttctacattccggaagatgaacctttcaagataattggcgcattgccttatctctatgagatcaatctgcgtcgtttcctgagccgtttgcagtattacgtcaatactgaccagctagtggttcggttatggaaagatgacgacaacacctatcacctgaaagggatgtgggttgatgataagtggatgttgatcaccggtaataacctgaacccgcgcgcctggcgtctggatctggaaaacgccattttgatccacgatccgcaacttgagctggcgccacagcgagagaaagaactggagctgatccgcgagcataccaccatcgttaagcactatcgcgatctgcaaagtattgccgattatccggtgaaggttcgtaaactcatccgccgtttgcgccgtatccgcatcgaccgattaattagccgcatcctgtaatcacaaccccgtcctgtacggggtttgttttttggaggccacgttttgcgtattctttttgtctgttcgctattgttactttctggatgcagccatatggctaacgatagctggagcgggcaggataaagctcaacactttatcgccagcgcgatgctttccgccgccggaaatgaatatagtcagcatcaggggatgagccgggatcgcagtgccatgtttggattgatgttctctgtcagtttgggggcgagtaaagagctttgggatagccgccccgaagggagcggctggagctggaaggatttggcctgggatgtcgccggtgcaagcaccggctataccgtctggcaactgacccgtcattaaagacgcatccccttccctttgcgatgtagcatcaaagaaaccagaaacgccaccacggccatcaaggtcacataccagaagaaggctgtttccattcctatacttttcaggctcaacgctacgtactccgcgctaccaccaaatatagcattagcgaccgcataactcagaccaacgcctaatgcgcgaacctgtgccgggaacatctcagccttcagtattccactgatacttgtataaaaactcactatcagcagggcacacatcaccagaccaaaagcggcataagggctggaaacgttttgcaatgcactgagaataggaacggtaaaaatggctgccaggctaccgaaacataacatactggtacggcgaccaatcttatcgctcagcgcgccaatgagtggttgaataagcatgaatacaaacaatgcggcagtcataatgccactcgccacgttggcatgcattcccgcagtatttaccagatacttctgcatataagtagtgaaggtatagaaacaaagggagcccgcagcggtaaaaccgagaaccatgatgaatgcacggcgattgcgccataatcctttcagagatccagcttcttttaaagcgcgcgtttcttgttggctagtttcatctaactgacgacgtaaccacaacgccacaacagctaacacagctcctaacgcgaaaggaatacgccatccccactctctgagtgcagcgtcttccatggtgtgttgtaaaaccacgacaaccagtagggctagcagttgtccgccgatcaacgtcacatactgaaaacttgcgtaaaaacctttgcgcccttcaacggcaacttcactcatataggtggcgctggtgccatattctccgccaacagataatccctgaaataaacgagcgagaagcaataatgccggagcccacgtacctatagtttcataacctgggaggcaggcgataaccaggcttccgaaacacatcatacacacgcttaacagcatgctttttttgcgaccatgtttatcggctatgcggccaaatagccaaccgcctattgggcgcatcaggaatcccgcagcaaaaacacctgctgtttgtagtagttgagtcgtcgtgttcccggaagggaagaagatgtgggcaaagtagagactacagaagctgtagacatagaaatcgaaccactcgaccagattaccactagaggcccccacaatcgcccaaatgcggcgacgagtatcactacttgtcagtttgctgtctgccgttacagtactttcagccatgccattatgtctcctgccgtaatccgatgcttttgtcggtcgcttttgtttattttttttgtaaaggaaatattatacatttgttgcatatcattatgcaaccttaaccatgaatttagttagcaggaaaatggttattgaggagcttaaggataaatttctggtaaggaggacacgtatggaagtgggcaagttggggaagccgtatccgttgctgaatctggcatatgtgggagtataagacgcgcagcgtcgcatcaggcatttttttctgcgccaatgcaaaaaggccatccgtcaggatggcctttcgcataatttgatgcctggcagttccctactctcgcatggggagaccccacactaccatcggcgctacggcgtttcacttctgagttcggcatggggtcaggtgggaccaccgcgctacggccgccaggcaaattctgttttatcagaccgcttctgcgttctgatttaatctgtatcaggctgaaaatcttctctcatccgccaaaacagcttcggcgttgtaaggttaagcctcacggttcattagtaccggttagctcaacgcatcgctgcgcttacacacccggcctatcaacgtcgtcgtcttcaacgttccttcaggacccttaaagggtcagggagaactcatctcggggcaagtttcgtgcttagatgctttcagcacttatctcttccgcatttagctaccgggcagtgccattggcatgacaacccgaacaccagtgatgcgtccactccggtcctctcgtactaggagcagcccccctcagttctccagcgcccacggcagatagggaccgaactgtctcacgacgttctaaacccagctcgcgtaccactttaaatggcgaacagccatacccttgggacctacttcagccccaggatgtgatgagccgacatcgaggtgccaaacaccgccgtcgatatgaactcttgggcggtatcagcctgttatccccggagtaccttttatccgttgagcgatggcccttccattcagaaccaccggatcactatgacctgctttcgcacctgctcgcgccgtcacgctcgcagtcaagctggcttatgccattgcactaacctcctgatgtccgaccaggattagccaaccttcgtgctcctccgttactctttaggaggagaccgccccagtcaaactacccaccagacactgtccgcaacccggattacgggtcaacgttagaacatcaaacattaaagggtggtatttcaaggtcggctccatgcagactggcgtccacacttcaaagcctcccacctatcctacacatcaaggctcaatgttcagtgtcaagctatagtaaaggttcacggggtctttccgtcttgccgcgggtacactgcatcttcacagcgagttcaatttcactgagtctcgggtggagacagcctggccatcattacgccattcgtgcaggtcggaacttacccgacaaggaatttcgctaccttaggaccgttatagttacggccgccgtttaccggggcttcgatcaagagcttcgcttgcgctaaccccatcaattaaccttccggcaccgggcaggcgtcacaccgtatacgtccactttcgtgtttgcacagtgctgtgtttttaataaacagttgcagccagctggtatcttcgactgatttcagctccatccgcgagggacctcacctacatatcagcgtgccttctcccgaagttacggcaccattttgcctagttccttcacccgagttctctcaagcgccttggtattctctacctgaccacctgtgtcggtttggggtacgatttgatgttacctgatgcttagaggcttttcctggaagcagggcatttgttgcttcagcaccgtagtgcctcgtcatcacgcctcagccttgattttccggatttgcctggaaaaccagcctacacgcttaaaccgggacaaccgtcgcccggccaacatagccttctccgtccccccttcgcagtaacaccaagtacaggaatattaacctgtttcccatcgactacgcctttcggcctcgccttaggggtcgactcaccctgccccgattaacgttggacaggaacccttggtcttccggcgagcgggcttttcacccgctttatcgttacttatgtcagcattcgcacttctgatacctccagcatgcctcacagcacaccttcgcaggcttacagaacgctcccctacccaacaacgcataagcgtcgctgccgcagcttcggtgcatggtttagccccgttacatcttccgcgcaggccgactcgaccagtgagctattacgctttctttaaatgatggctgcttctaagccaacatcctggctgtctgggccttcccacatcgtttcccacttaaccatgactttgggaccttagctggcggtctgggttgtttccctcttcacgacggacgttagcacccgccgtgtgtctcccgtgataacattctccggtattcgcagtttgcatcgggttggtaagtcgggatgacccccttgccgaaacagtgctctacccccggagatgaattcacgaggcgctacctaaatagctttcggggagaaccagctatctcccggtttgattggcctttcacccccagccacaagtcatccgctaatttttcaacattagtcggttcggtcctccagttagtgttacccaaccttcaacctgcccatggctagatcaccgggtttcgggtctataccctgcaacttaacgcccagttaagactcggtttcccttcggctcccctattcggttaaccttgctacagaatataagtcgctgacccattatacaaaaggtacgcagtcacacgcctaagcgtgctcccactgcttgtacgtacacggtttcaggttctttttcactcccctcgccggggttcttttcgcctttccctcacggtactggttcactatcggtcagtcaggagtatttagccttggaggatggtccccccatattcagacaggataccacgtgtcccgccctactcatcgagctcacagcatgtgcatttttgtgtacggggctgtcaccctgtatcgcgcgcctttccagacgcttccactaacacacacactgattcaggctctgggctgctccccgttcgctcgccgctactgggggaatctcggttgatttcttttcctcggggtacttagatgtttcagttcccccggttcgcctcattaacctatggattcagttaatgatagtgtgtcgaaacacactgggtttccccattcggaaatcgccggttataacggttcatatcaccttaccgacgcttatcgcagattagcacgtccttcatcgcctctgactgccagggcatccaccgtgtacgcttagtcgcttaacctcacaacccgaagatgtttcacttcagagttgcgaaaatttgagagactcacgaacaactttcattgttcagtgtttcaattttcagcttgatccagatttttaaagagcaaatatatcaaacaagacttaacagtctgttttgagatattgaggtcggcgactttcactcacaaaccagcaagtggcgtcccctaggggattcgaacccctgttaccgccgtgaaagggcggtgtcctgggcctctagacgaaggggacacgaaaattgcttatcacgcgttgcgtgatattttcgtgtagggtgagctttcattaatagaaagcgaacggccttattctcttcagcctcactcccaacgcgtaaacgccttgctattcacttttcatcagacaatctgtgtgagcactgcaaagtacgcttctttaaggtaaggaggtgatccaaccgcaggttcccctacggttaccttgttacgacttcaccccagtcatgaatcacaaagtggtaagcgccctcccgaaggttaagctacctacttcttttgcaacccactcccatggtgtgacgggcggtgtgtacaaggcccgggaacgtattcaccgtggcattctgatccacgattactagcgattccgacttcatggagtcgagttgcagactccaatccggactacgacgcactttatgaggtccgcttgctctcgcgaggtcgcttctctttgtatgcgccattgtagcacgtgtgtagccctggtcgtaagggccatgatgacttgacgtcatccccaccttcctccagtttatcactggcagtctcctttgagttcccggccggaccgctggcaacaaaggataagggttgcgctcgttgcgggacttaacccaacatttcacaacacgagctgacgacagccatgcagcacctgtctcacggttcccgaaggcacattctcatctctgaaaacttccgtggatgtcaagaccaggtaaggttcttcgcgttgcatcgaattaaaccacatgctccaccgcttgtgcgggcccccgtcaattcatttgagttttaaccttgcggccgtactccccaggcggtcgacttaacgcgttagctccggaagccacgcctcaagggcacaacctccaagtcgacatcgtttacggcgtggactaccagggtatctaatcctgtttgctccccacgctttcgcacctgagcgtcagtcttcgtccagggggccgccttcgccaccggtattcctccagatctctacgcatttcaccgctacacctggaattctacccccctctacgagactcaagcttgccagtatcagatgcagttcccaggttgagcccggggatttcacatctgacttaacaaaccgcctgcgtgcgctttacgcccagtaattccgattaacgcttgcaccctccgtattaccgcggctgctggcacggagttagccggtgcttcttctgcgggtaacgtcaatgagcaaaggtattaactttactcccttcctccccgctgaaagtactttacaacccgaaggccttcttcatacacgcggcatggctgcatcaggcttgcgcccattgtgcaatattccccactgctgcctcccgtaggagtctggaccgtgtctcagttccagtgtggctggtcatcctctcagaccagctagggatcgtcgccttggtgagccgttaccccaccaacaagctaatcccatctgggcacatccgatggcaagaggcccgaaggtccccctctttggtcttgcgacattatgcggtattagctaccgtttccagtagttatccccctccatcaggcagcttcccagacattactcacccgtccgccactcgtcagcgaagcagcaagctgcttcctgttaccgttcgacttgcatgtgttaggcctgccgccagcgttcaatctgagccatgatcaaactcttcaatttaaaagtttgatgctcaaagaattaaacttcgtaatgaattacgtgttcactcttgagacttggtattcatttttcgtcttgcgacgttaagaatccgtatcttcgagtgcccacacagattgtctgataaattgttaaagagcagtgccgcttcgctttttctcagcggcgcggggtgtgcataatacgccttcccgctacagagtcaagcatttctttgcttttctctgttgagattctcaggagaaccccgccgacccggcggcgtgtttgccgttgttccgtgtcagtggtggcgcattatagggagttattccggcctgacaagcgaaaaatataaaaactttatcgttcgctcacttttcaggcaaaacatcttaaatatagtcttttccgtctaacttatagacaaaaacgagccccgaagggctcgttttatcatttactggacggcgacaatccggtcttcattaacttccaggcgaatcactttacccggaaccaattcaccagacagtatttgctgtgccagcgggttttcgatctgctgctgaattgcacgtttcagaggacgtgcaccatagaccggatcgtaaccgttctcgctcagcagtttcagcgcctcgtcagaaatgtggatttcataaccacgttcttccagacgtttgtacagacgtttcaactgaatctgcgcaatgctggcaatgtgctgttcacccagcggatggaagaccaccacttcatcgatacggttaatgaattccggacggaagttatggcttaccacaccgagcaccagctctttcatgtgcgcataatccagttcaccgaagcgttcctgaatcagatcggaaccgaggttagaggtcataatgacgaccgtattacggaagtcgaccgttctcccttgcccgtcagtcagacgcccatcatccagtacctgcaacagaatgttgaagacatccggatgcgctttttccacttcatccagcaggatgacggaatacggacgacgacgcaccgcttcggtcaggtagccaccttcttcataaccgacatatcccggaggcgcaccaaccaaacgagacacgctgtgtttctccataaactcggacatatcgatacggaccatcgcctcgtcgctatcaaacataaagttcgccagcgccttacaaagctctgttttccccacaccagttgggccgaggaacaggaaactaccaatcgggcgatttggatccgccagccccgcacggctacgacgaatagcgttagataccgcatcaaccgcttcgttctgaccaattacgcgatggtgcagttcttgctccatacgcagcagtttttcgcgctcgctttccatcatgcgagaaaccggaatccccgtccaacgcgccagcacttcagcaatttcggcgtcggtcactttattacgcaacagacgcatagttttgccttcgagctgcgttgcggcttccagttgcttttccagttccgggattttgccgtattgcagttcagacatccgcgccaggtcccccacacggcgagcctgttcaatagcgattttcgcctgttccagttccgctttaatggtctgcgtaccagaaaggcttgccttctctgctttccactcttcttctaactcggagtactgacgttctttgtcgctcagttcttcgttgagcatatccagacgttttttactggcttcatcagactctttcattaacgcctgttgttccagtttgagctggatgatacgacgatcgagtcggtcgagttcttctggtttactgtcaatctgcatacgaatgctggatgctgcttcatcgatcaggtcgatggctttatccggcagctgacggtcagcaatgtagcgatgagacaacgtcgccgctgcaacaattgccgggtcagtaatttgcacatggtggtgcaattcgtaacgttctttcaggccacgcagaatcgcaatggtatcttcaacagaaggctcggcaacaaacactttctggaaacgacgttccagcgcagcatctttttcaatgtactggcgatattcgtcaagcgtcgtggcacctacgcagtgcaattcaccacgcgccagcgccggtttcagcatgtttccggcgtccattgcgccatcggctttacccgcgccgaccatggtatgtaattcgtcgataaataggatgacgttgccttcctgtttggcaagatcgttaagcacgccttttaaacgttcttcaaactcaccgcgatatttcgccccagccaccagcgcgcccatatccagcgccagtacccggcggcctttcaacccttccggcacttcgccgttgataatacgctgcgccagaccttcaacgatggcagttttaccgacgccgggttcaccaatcagtaccgggttatttttagtacgacgttgcagcacctgaatggtacggcgaatttcttcatcacgaccaatcaccggatcgagtttgccctgttcggctcgttcggtaaggtcgatggtatattttttcaaagcctgacgttggtcttcagcaccttgatcgttcacgctttcacctccacgcatttgttcaatcgcttgagtaatgttggcggtggtcgcccctgctgctttcaggatgtcggccagcgtgccgcgagactcaagtgccgccagaacgaacagttcactgctgataaagttatcaccacgtttttgcgccagcttgtcgcaaagattaagaacgcgcaccagatcctgacttggctggacatcaccaccagtaccttcaacctgcggtaaacgatttaatgcctgattgatatctgtgcgcaactggccagcatttatgccagcggatgttaataaaggactaacgctacccccttcctgattcagcagggcgctcattaaatgaagtggttcgataaattggttgtcgtgcccgagtgcaagactttgggcatcggcaagagcaagctggaatttattagtaagacgatccagacgcataactcctcccataacggatcaaagttgctactggagattaaatgaggtcatccctcaattattcaaggttattgaccagattaatgtgaaaagaaaatcacgcgtaccggatcgtcttgattctttaggttatatcagccaaatgaaacttgccatacgaccggtggtcttgtcgcgacgataagagaagaaagtctcattttccgtatatgtacaacggtcgccgccgaaaatttgctcaacacccacgttcgccagacgctgccgggcaagctgataaatatccgccagatacttatcaccatgctgaatgaaagctgcacttgctttagcgtctactgccataaacgcctcgcgaacctccccccccacttcgaacgcgcgtggaccaattgccggccctaaccaggcgagaatattttccggattatcagcaaaacaggaaaccgtctcttccagcacgcctgcgcacagtccacgccagccagcatgagcggcggcgacttccgttcccgctcgattgcaaaacagcacagggaggcagtcggcagtcatcactgcgcaaaccgtgccgggcgtattgctataagaggcatccgcccgtttactggcataaggttcgccagtgagcttaagcacatctttgccgtgtacctgctcaagccagaccggtttagaaggcaaattgcccgcagcaaaaagtcgcttgcgattctcctcaacgtgatccgggttatcgccacaatgggcaccgaggttgagactgtcatacgggggcaagctcacgccgccgatacgagtggagctacaggccgcaacaccttttggctgcggccactgcgggacaatcagcttactcataaccagtccacttcatccttatgttcttcgaaatcggcgcgcatcacctcaatcagctccaccatatcttgtggaataggcgcatgccattccatttcgatgccggagatcgggtgataaagacgcagcatggttgcatgtagcgcctggcggtcaaacttacgcagcgtggagataaatgcttcgctagcaccttttggcggacgcggacggccaccataaaccggatcgcccaccagcggatgagtgatatgggccatatgcacgcggatctggtgcgtacgtccagtttccagacgcaaccgcagacgcgtgtgcacacggaagtgttccatgatgcgatagtgagtcaccgctggtttgcccatcggatgcaccgccatatgggtacgtttggtcgggtggcgactgattggctcgtccaccgtgccacctgcggtcatatgaccaatcgccaccgcttcatactcacgagtaatttcacgccgttgcaaagattcgactaaacgcgtctgagccggaacggtttttgccacaaccatcaggccagtggtgtctttatccagacgatggacgatgcccgcacgcggtacatcggcaatgggtggatagtaatgaagcaacgcattcagtaccgtgccatccgggttacccgcgccaggatgtaccaccaggtcgcgcggtttattaatgataataatgtcttcatcttcatagacgatatccagcgggatatcctgcggttcaaaacgcgcttcttcttcaatctcagcgttgatggcaacctgctcgccacccaatactttttctttcggcttatcacaaactttgccgttaaccagcactcgctggtcgaggatccattcttttattcggctacgactataatccgggaacatttcggccaaagcctgatctaagcgttgaccgagttggttttcggacaccgttgcagtgagctgtactcgttgtgccatatatactgcttcttcgtttatcgttggggttttacggctttgccgtttaatatagtgtgctattgtagctggtcttaaccgggagcaggaacagagaatctcccgtattacattttgaggaaagtcaaaacgtcatgacgcgcatgaaatatctggtggcagccgccacactaagcctgtttttggcgggttgcagcgggagtaaggaagaagtacctgataatccgccaaatgaaatttacgcgactgcacaacaaaagctgcaggacggtaactggagacaggcaataacgcaactggaagcgttagataatcgctatccgtttggtccgtatagccagcaggtgcagctggatctcatctacgcctactataaaaacgccgatttgccgttagcacaggctgccatcgatcgttttattcgccttaacccgacccatccgaatatcgattatgtcatgtacatgcgtggcctgaccaatatggcgctggatgacagtgcgctgcaagggttctttggcgtcgatcgtagcgatcgcgatcctcaacatgcacgagctgcgtttagtgacttttccaaactggtgcgcggctatccgaacagtcagtacaccaccgatgccaccaaacgtctggtattcctgaaagatcgtctggcgaaatatgaatactccgtggccgagtactatacagaacgtggcgcatgggttgccgtcgttaaccgcgtagaaggcatgttgcgcgactacccggatacccaggctacgcgtgatgcgctgccgctgatggaaaatgcataccgtcagatgcagatgaatgcgcaagctgaaaaagtagcgaaaatcatcgccgcaaacagcagcaatacataacagaaacctgaaacacaaaacggcagcccttgagctgccgtttttttattctgtcagttgtgaaactgaagcgatttagtcgctatcgatctcatcaaatatggctcgctttgagatattcctcaagtaaaaaaacatctcttcctgcgatttctcacaaaaaagattcgttgacaaaaagtgacaaaattatgagattttcatcacacattttgacatcaggaacggtatgctgaattcaccaagacgggaagacaagaggtaaaatttatgacaatgaacattaccagcaaacaaatggaaattactccggccatccgccaacatgtcgcagaccgtctcgccaaactggaaaaatggcaaacacatctgattaatccacatatcattctgtccaaagagccacaagggtttgttgctgacgccacaatcaatacacctaacggcgttctggttgccagtggtaaacatgaagatatgtacaccgcaattaacgaattgatcaacaagctggaacggcagctcaataaactgcagcacaaaggcgaagcacgtcgtgccgcaacaagcgtgaaagacgccaacttcgtcgaagaagttgaagaagagtaatcctttatattgagtgtatcgccaacgcgccttcgggcgcgttttttgttgacagcgtgaaaacagtacgggtactgtactaaagtcacttaaggaaacaaacatgaaacacataccgtttttcttcgcattcttttttaccttcccctgaatgggaggcgtttcgtcgtgtgaaacagaatgcgaagacgaacaataaggcctcccaaatcggggggccttttttattgataacaaaaaggcaacactatgacaagcgaaaacccgttactggcgctgcgagagaaaatcagcgcgctggatgaaaaattattagcgttactggcagaacggcgcgaactggccgtcgaggtgggaaaagccaaactgctcagccatcgcccggtacgtgatattgatcgtgaacgcgatttgctggaaagattaattacgctcggtaaagcgcaccatctggacgcccattacattactcgcctgttccagctcatcattgaagattccgtattaactcagcaggctttgctccaacaacatctcaataaaattaatccgcacagtgcacgcatcgcttttctcggccccaaaggttcttattcccatcttgcggcgcgccagtatgctgcccgtcactttgagcaattcattgaaagtggctgcgccaaatttgccgatatttttaatcaggtggaaaccggccaggccgactatgccgtcgtaccgattgaaaataccagctccggtgccataaacgacgtttacgatctgctgcaacataccagcttgagcattgttggcgagatgacgttaactatcgaccattgtttgttggtctccggcactactgatttatccaccatcaatacggtctacagccatccgcagccattccagcaatgcagcaaattccttaatcgttatccgcactggaagattgaatataccgaaagtacgtctgcggcaatggaaaaggttgcacaggcaaaaagtccgcatgttgctgcgttgggaagcgaagctggcggcactttgtacggtttgcaggtactggagcgtattgaagcaaatcagcgacaaaacttcacccgatttgtggtgttggcgcgtaaagccattaacgtgtctgatcaggttccggcgaaaaccacgttgttaatggcgaccgggcaacaagccggtgcgctggttgaagcgttgctggtactgcgcaaccacaatctgattatgacccgtctggaaagtcgcccgattcacggtaatccatgggaagagatgttctatctggatattcaggccaatcttgaaagtgcggaaatgcaaaaagcattgaaagagttaggggaaatcacccgtagtatgaaggtattgggctgttacccaagtgagaacgtagtgcctgttgatccaacctgatgaaaaggtgccggatgatgtgaatcatccggcactggattattactggcgattgtcattcgcctgacgcaataacacgcggctttcactctgaaaacgctgtgcgtaatcgccgaaccagtgctccaccttgcggaaactgtcaataaacgcctgcttatcgccctgctccagcaactcaatcgcctcgccgaaacgcttatagtaacgtttgattaacgccagattacgctcactgctcataatgatgtcggcataaagctgcggatcctgagcaaacagtcgcccgaccatcgccagctcaaggcggtaaatcgggctagagagcgccagaagttgctcaagctgaacattttcttctgccaggtgcagcccgtaagcaaaagtagcaaagtggcgcagtgcctgaataaacgccatattctgatcgtgctcgacggcgctaatacgatgcagccgagcgccccagacctgaatttgctccagaaaccattggtatgcttccggtttacgtccatcacaccagaccacaacttgctttgccaggctaccgctgtccggaccgaacatcgggtgtagccccagcaccggaccatcatgcgccaccagcatggcctgtaatggcccatttttcacacttgccagatcgaccagaatacaatctttcggtaaaggcggtaatttgccaataacttgctcagtaacgtggattggcacactaacaatcaccattccggcatcggcaacaatatcagccgctcgatcccagtcatgttgctccagaatccgcacctgataaccgctgagggtcagcatcttctcgaacaggcgtcccatctgaccgccaccgccgacgataaccaccggacgcagactcggacaaagtgttttaaatcctttgtcgttttcactggagtaagattcacgcatcacccgacgcaaaacatcctcaatcagatctggcggtacacccagagcttccgcctctgcacgacggctggccaacatagatgcctcgcgctccggaacataaataggcagtccaaagcggcttttcacctcgcccacttcagcaaccagttccagacgcttcgctaataaattcagcagcgctttatcgacttcatcaatttgatcgcgtaatgcggtcaattcagcaaccataataaacctcttaagccacgcgagccgtcagctgcccgttcagatcctgatgaatttcacgcagcaaggcatcggtcatttcccagctaatgcaggcatcggttacggatacaccgtatttcatttcactgcgcggttgctcggaagactgattgccctcgtggatattactttcgatcatcagaccaataatactgcgattgccatctttgatttgagcaaccacggattctgccaccgcaggctgacggcgataatctttattggaattaccgtggctgcaatctaccatcagagacgggcgcagtcccgcctgttccatctctttttcacattgcgcaacatccgcagggctatagttcggcgctttaccaccgcgcaggatcacatggccgtccggattcccctgagtttgtagcaacgcaacctgccctgcctggttaatgccaacaaaacggtgcggctgggcggcggcgcgcatagcgttaattgctgttgccagactgccgtcggtgccgtttttaaaaccaaccggcatggaaagcccggaggccatttcacggtgagtttggctttccgttgtacgagcaccaattgcactccagctaaacagatcgcccaggtattgcgggctattcggatctaacgcttccgtcgccagtggcagtcccatattcaccagctcaagcagcaatttacgcgcgatctgcagcccggcttctacatcaaaagagccatccatatggggatcgttaattaaccctttccagccgacagtggtacggggtttttcaaaatagacgcgcattaccagatagaggctatcgctgacctctgcggcaagggctttaaatcgacgagcatattccagagcagtttccggatcatgaatggaacaaggaccacatactaccagcagacgaggatcgcgcccggcgataatatcactaatgcttttacggctgtcagcaatctgggcttcttgttgcaggctcaatggaaaagcggccttcagttgttccggagtcattaaaacctgttcgtcggtaatatgtacgttattcagcgcgtctttttgcatgatggcgatcctgtttatgctcgtttgcgatagttgatcctcagcgaggatgacgtaacgataacacataaagtaaagttttcaatccatatttcgtacatttttatttacacaggcaatttagtcgcgctttcaacccttacctctgtatagataaatttacactccctttgaaaacaatccgctatgctttgaaaaaggagaaagaaatgatgaaaaagtttatcgcccccttgttggctttactggttagcggatgtcagattgatccttatactcacgcgccaaccttgaccagcaccgactggtatgatgtcggtatggaagatgcgataagcggcagcgccataaaagatgacgatgcatttagcgatagtcaggcggatcgcggtctataccttaaaggatatgccgaaggacaaaagaaaacttgccagaccgattttacttatgcccgaggactttccggtaaaagctttcctgccagctgcaacaatgttgaaaatgccagccaactgcatgaagtatggcaaaaaggggctgatgaaaatgccagcacaatacgattaaattaattaaaaccccacaaataaattaaacataagattttactcattgtgttttatttctcacattgatgacggtcgcatgaaaaaatgatattttaatgagcattctgaaaaaatatcgatgcatttcgagcgaagatggtggggatccctgaatgcgtttttctcaccgactgttcttacttctgattctcctgctgacgggagcaccaatactcgctcaggagccttctgacgttgcgaaaaacgtgcgtatgatggtttccggtattgtcagttacacccgctggcctgcgctaagtgggccaccaaagttatgtatctttagttctagtcgttttagtaccgccctacaagagaatgccgcgacatctttgccttatctgcctgtcatcattcacactcaacaagaggcgatgattagtggctgcaatggtttttattttggcaacgagagtccgacattccagatggaattaaccgaacaatatccgagtaaggcgttattattaattgccgaacaaaataccgagtgcattattggtagcgccttttgtctgatcatccacaataatgacgtcagatttgccgtaaacctggatgccttaagccgtagcggtgtaaaggtcaacccggatgtcttaatgctcgcacggaagaaaaatgatggataacgataattctcttaataagcgccccacgtttaaaagagcattacgcaacatcagtatgaccagcatatttatcactatgatgctgatctggttgctgctttccgtgaccagcgtgctgaccctgaaacagtacgcgcaaaaaaacctggcactgacagcagcaacaatgacttacagtctggaagcagctgtcgtttttgccgatggccctgcagcaactgaaacactggcagcgctgggccagcaagggcaatttagtactgcagaagtacgtgataagcagcaaaatattctggcatcctggcattacacccgtaaggatccaggcgatactttcagtaatttcataagccactggctcttccctgcccccatcattcagccgattcgtcacaatggtgaaaccattggcgaagtacgcttaaccgctcgcgacagtagtatcagccattttatctggtttagcctcgccgtactgaccggttgtattctgctggcaagtggcatcgcaattaccctcacccgccatttgcacaatggcctggtagaagcgctgaaaaatatcaccgatgtcgtacatgatgtgcgttccaaccgcaatttttcccgacgagttagcgaagaacgtatcgctgagtttcaccgcttcgctctcgacttcaacagtctgctggatgaaatggaagagtggcagcttcgtttacaggctaaaaatgcgcagcttctacgtaccgcgctacatgacccattaaccgggctggctaaccgcgcagcgtttcgtagcggcatcaacacgttgatgaacaattccgatgcccgaaaaacgagcgcgttactatttcttgatggcgataatttcaaatacatcaatgatacctggggtcatgcgacgggcgatagagtcttgattgaaatcgcaaaacggttagctgaatttggcgggctgcgacataaagcataccgcctgggcggcgatgaattcgctatggtgctctatgatgtacagagcgaatctgaagtgcagcagatatgtagtgcactgacacaaatctttaatctcccgtttgatcttcataatggccatcagaccaccatgacattaagcattggttacgcgatgaccattgagcacgcctctgcggaaaaattacaagagcttgccgatcacaatatgtatcaggccaaacaccagcgtgccgaaaagctggtgagataacaaggatatatcgatatgataaagcacctggtagcacccctggttttcaccagtctaatactgactggctgccagtcccctcagggaaagtttactcctgagcaagtcgccgctatgcaatcttatggatttactgaatccgccggcgactggagcctgggcttaagtgatgccattctgttcgcaaaaaatgactacaaattgctcccggaaagccagcaacagatccaaaccatggcagctaaattggccagcacagggctaacacatgcccgtatggatggacacaccgataactatggtgaagacagttacaacgaaggcttaagtttgaaacgggcgaatgtcgtggccgatgcatgggctatgggtggacaaattccacgcagcaatctcaccacacagggtttaggaaaaaaatatcccatagccagtaacaagaccgcccagggccgcgccgagaaccgccgcgtcgcagtggtgattactaccccttaaaacaccagcaaacagataaaaaagggccagccaattggccagcccttcttaacaggatgtcgcttaagcgaaatcttagttaagacgctctttgatacgagcagccttaccagtacgctcacgcaggtagtacagtttagctttacgaacagcaccacgacgtttgacagaaatgctgtcaactaccggagagtgagtctggaagacacgctcaacgccttcgccgttggaaattttacgaacagtgaatgcagagtgcagaccgcggttacgaatagcgataaccacgccctcgaatgcctgcagacgttttttggaaccttcaacaacccatactttcacttccacggtatcacccggacggaaggaaggtacgtcctgcttcatctgctcttgttcaagttgcttaataatgttgctcataatttaatctcttatcctgggtaaactgatatctcgggggcttacgccatcccatcatgtttatgttgctgttgtgcgtgttccgttttgaactccgccagcaaccttgcttgctcttcagtcagagccaggttttccagaagttcaggtcttctaagccaggtacggcccaggctctgtttcaaacgccagcgacgtatctcggcatggttgccgctcagtaacactggcggaacttccatcccttctaacacctcaggccgcgtatagtgcgggcaatccagcaatccttcagcaaaggaatcttccgttgcgctggcttcatgtcccagtactcccggaataaaccgggaaacggagtcaatcagcgtcattgctggtaactcaccaccactgagaacgtaatcgccgatactccattcttcgtcaatttcggtttggatcacgcgctcatctataccttcgtagcgaccgcacaccagaatcaatttttgattcgttgccagttcgctgacgcccgcttgatcaagcttgcgtccctgtggactcagataaatcacctttgcgccttcacccgccgcggcttttgctgcatgaatggcgtcccgcaagggttgcaccatcattaacatccccggtccgccgccgtaaggacgatcgtccacggtacggtgccggtcatgcgtgaagtcgcgaggactccagctctggatgctcagcaggccatttttaactgcccggccagttaccccgtaatcggtaattgcgcggaacatttcaggaaacaggctaattatgccaatccacatagcgccgtcttttaccgtttatccggtggtttaaaaaccaggatcccaatctacttcgatactacgagtagtgagatcgactttcttgataacctgcccatcgaggaacggtacgagacgttccttgataccaaacgcatctttcaggtttgccttaatgacgagaacgtcattagatccggtttccatcatatcgacgactttaccgagatcgtagccttcagtggttactacctggcagcccatcaggtctttccagtagtagtccccctcttcaagctgaggcagctggctactatccacgacaatttcacaattcgtcagcaggttcgccgcatcacgatcgtcaacgcctttcagcttgatgatcatgtcctgattgtggtgcttccagctttccagctggacttgctgccactgacccgccttctggataaaccagggctgatagtcaaaaatgctttcggcgtcttcggtggaagaaaacactctgagccacccacgaataccgtaagagctacccatttttcccaaaacgatgggatcaacaggtgcttgcgcggtgagttgtttgctcatcatgaccaccgtgacagattaagctgctttgtttacttctttgatcagcgcagcaacgcgatcagaaatagttgcgccctggccaacccagtgagcgatgcgatccagatccaggcgagtgccttcttctttttcgctagcgattgggttgaagaaaccaacgcgctcgatgaagcgaccgttgcgtgcattacggctgtcagcgacaacaacctggtagaacggacgctttttagcgccgtgacgtgctaaacgaatagttaccataacatcctcttgtgtgaataaaacaaccggaccccatcgaggaacggagtccggtgtcatattaaaagcccgaaaattttactcatttttgcgggaattgcaatcaacagttgctaactctgctgtaaaaggccgtcggcggtgcagccagtttggtgccggagtgcgcgcagtcaccggagcgtacacgcagtacgtgaggatgacgagcacatcccggtgccaaaatggcaaacaagccaggccgattagcgaccagggaagcctgggggcatcatacccttcatgcttctcatcatcttcgccattccgcccttcttcattttcttcatcatgcgctgcatgtcgtcgaactgtttcagaagacggttaacgtcctgcacctgcataccgcaaccggcagcaatacggcgtttacggctacctttgatgatttctggcttagcgcgctctttcatcgtcatgctgttgatgatggcttccatacgcaccagcactttatcgtccatctgactcttgacgttatccgggatctgccccatgcccggcagcttgcccatcagactagccatgccgcccatatttttcatctggcgcagctgctcaagaaagtcgttgagatcgaagccgtcaccttttttcagcttgctggctaatttctctgcctgcgcgcggtcaactttgctttcgatatcttcgatcaggctcagtacgtcgcccatgccgagaatacggctcgcgatgcggtccggatggaacggctccagcgcctcagttttctcgccaacaccgaggaacttgatcggtttgccagtgatgtgacgaatagagagcgccgcaccgccgcgggcatcgccgtccactttggtcaacactacgccggtaagcggtaacgcttcattgaatgcttttgccgtattggccgcatcctgaccggtcatggcgtcaaccacaaacagggtttcaaccgggttaatgctcgcatggacttgtttgatctcgtccatcatcgcttcgtcaacgtgcagacgaccagcggtatccaccagcagcacgtcgtagaatttcagtttggcttctttcagcgccgcgttaacgatatctaccggcttctgaccaacatcagaagggaagaaatcaacgcccacctgctctgccagcgtctcaagctgtttgattgccgccgggcgataaacgtcggcagaaaccaccagcactttcttcttgtgcttctcgcgcaggaacttaccgagtttaccaacgctggttgttttaccggcaccttgcaggcccgccatcagtacgaccgcaggcggttgcgcagccaggttcagggtctggttctcttcgcccatcgccgcaaccagttcgttacggactattttgacgaactcctgccccggcgtcaggctcttattaacttcatgaccaaccgctttctcttttacgcgattgataaactcacgcactaccggcagagctacgtccgcctccagcagcgccatgcgcacttcgcgcagcgtatcttttacgttgtcttcagtgaggcgtccacggccactgatattgcgcagcgtgcggctcaaacgatcggttaaattatcaaacattgtctctcgcctggggtggaaacggttggccgcaatcgcgacacatcatcagtattttgccgcagtataacatgaaggcgtctttgttgttatgcaacggttggagcagcgtagtcctgacgctatactgcttctctttcttattgctcaaactgtcgacatcactatgcccgtttttgctctgctcgcgcttgtcgcctactccgtcagtcttgcgctgattgttcccggtctgctgcaaaaaaacggcggctggcggcgcatggctattatttctgcggtcattgcgctggtctgccacgcaatcgctctggaagcccgcatcctgcccgacggtgatagcggacaaaacctcagcctgctgaacgttggtagtttggtcagtttgatgatctgtacggtaatgaccattgtggcttctcgcaatcgtggctggctgctgctacccattgtctatgcctttgcgcttatcaacctggcgctggcaaccttcatgcccaatgaatacatcacccatctggaagctacgcctgggatgctggtgcacattggcttaagcctcttttcctatgccacgctaattatcgccgccctgtacgcgctgcaactggcgtggattgattaccaactgaagaacaagaagctggcgtttaaccaggaaatgccgccattgatgagtatcgagcgtaaaatgttccacatcacgcagattggcgtggtgctgctaacgctcacgctttgcactggcctgttctacatgcacaacttatttagcatggaaaatatcgacaaggctgtgctctctatcgtggcgtggtttgtctatattgtgctgctgtggggacattatcatgaaggatggcgtggacgccgcgtcgtctggtttaacgttgcgggcgcggtaattctgacactggcctacttcggcagccgaattgtccagcagttaatcagctaaacccagaaaaggagtttcccctggaacacatttctactactacgttgatcattattctgatcatcatggtggtcatttcagcctatttttccgggtccgaaaccggaatgatgaccctcaaccgctatcgtctgcgacatatggcgaaacagggtaatcgcagcgccaaacgcgtcgaaaaattgctgcgtaagccagaccgcctgataagcctggtgttaatcggcaataacctggtcaatattcttgcctccgcgctcggcactattgttgggatgcgtttgtacggcgatgcgggcgtggcaattgcgactggtgtgctgacttttgtcgtactggtatttgctgaggtattgccgaaaaccattgccgcgctgtacccggaaaaagtcgcttatccgagtagttttctgctggctccgctgcaaattttgatgatgccgctggtctggttgctgaatgctatcacccgtatgctgatgcgcatgatgggtatcaaaaccgatatcgtggttagcggctctttgagcaaagaagagttgcgcactatcgtgcacgaaagtcgcagtcaaatttcccgtcgcaatcaggatatgctgctgagcgtgctcgatctggaaaaaatgaccgttgatgacatcatggtgccgcgcagtgaaattatcggtattgatatcaacgatgactggaaaagcattctgcgccaactctcccacagtcctcacgggcgcatcgtgctctaccgtgatagcctggacgacgccatcagtatgctgcgagtacgtgaagcctggcggttgatgagcgagaaaaaagagttcaccaaagaaaccatgctgcgcgccgcggacgagatctattttgtgccggaaggtacgccgctcagcacgcagttggtaaagtttcagcgcaacaaaaagaaagtcggcctggtcgtcaacgagtatggagacattcaggggctggtgacggttgaagatattctggaagagattgtcggcgatttcactacgagcatgagcccaacacttgccgaagaggtcacgccgcaaaacgacggtagcgtgattatcgatggcaccgccaacgtgcgggaaatcaacaaagcctttaactggcatctaccggaagatgatgcccgcacggttaatggcgtcattcttgaggcactggaagagatccctgtcgcaggcacccgcgtgcgtattggcgagtacgatatcgatattctcgacgtacaggacaatatgattaagcaggtaaaagtttttcctgtgaaaccgctgcgcgagagtgtggcggagtaacgaaaacggcccggcattcgcatgcagggccgtgaattattacgaaagcagaaattaagcttttgctttcgctacagtaaccatcgccgcacgaatcgtacgaccattcagcgtataacccttctgcataatgcccagtacgttacctggcgcaacgtcatcagattccaccattgcgatggcctgatgcacattcgggtccagtgggacgttagtttcggcgatcacttcaacgccaaacttacgcacaacatccagcatgctcttcagcgtcagctcaatgccttcaaccatcgcagacatatccgggttagctttatcagccacttccagcgcacgatccaggctatcaatcaccggcagcaattcgttgatgaatttctccagcgcgaatttgtgggctttttcaatatccagttcagtacgacgacgcaggttttccatttcggcttttacacgcaaaatgccgtcacgttcacgggtctgggcttcagccagctgagcttcgagattcgcaactttttcatcgcgcggatccacctgctcagcagaagcttctggctcaactgcctcaatctcttcgtgctgatccatgataatttcttccggggcttgcccctcaggcgttttctgttctttactactcatgaatttctccgcgtttttttcgcattcatctcgctaacttcgcttattatggggatcagtttcagggtttcaagggaagcactcacattgtcatcaatcttcgcaacaaggacctcggaaaaatgaataatcatttcaagtgtattggcattgtgggacacccacggcaccccactgcactgacaacacatgaaatgctctaccgctggctgtgcacaaaaggttacgaggtcatcgttgagcaacaaatcgctcacgaactgcaactgaagaatgtgaaaactggcacgctcgcggagattgggcaactagctgatctcgcggtagtcgttggtggcgacggtaatatgctgggcgcggcacgcacactcgcccgttacgatattaaagttattggaatcaaccgtggcaacctgggtttcctgactgaccttgaccccgataacgcccagcaacagttagccgatgtgctggaaggccactacatcagcgagaaacgttttttgctggaagcgcaagtctgtcagcaagattgccagaaacgcatcagcaccgcgataaatgaagtggtgcttcatccaggcaaagtggcgcatatgattgagttcgaagtgtatatcgacgagatctttgcgttttctcagcgatctgatggactaattattagcacgccaacaggctccaccgcctattccctctctgcaggcggtcctattctgaccccctctctggatgcgattaccctggtgcccatgttcccgcatacgttgagtgcacgaccactggtcataaacagcagcagcacgatccgtctgcgttttagccatcgccgtaacgacctggaaatcagttgcgacagccagatagcactgccgattcaggaaggtgaagatgtcctgattcgtcgctgtgattaccatctgaatctgattcatccgaaagattacagttatttcaacacattaagcaccaagctcggctggagtaaaaaattattctaattttacgccagcctctttactgtatataaaaccagtttatactgtacacaataacagtaatggtttttcatacaggaaaacgactatgttggcacaactgaccatcagcaactttgctatcgttcgtgagcttgagattgattttcatagcggcatgaccgtaataactggcgagaccggcgcgggtaaatctattgcaatagatgccctcggtctttgtctcggtggtcgcgctgaagccgacatggtgcgtaccggcgctgctcgcgctgacctgtgcgcccgtttttctctgaaagatacgccagcggctctgcgctggctggaagaaaaccagcttgaagacgggcatgaatgtttgcttcgtcgcgtgatcagcagcgatggtcgctcccgtggtttcatcaacggtacagctgttcctctgagtcaactgcgcgaactgggtcagttgctgattcagatccatggtcagcacgctcatcaattactcaccaaacctgagcaccaaaaattcctgcttgatggctatgccaatgaaacctctctactgcaggaaatgaccgcacgttatcagttgtggcatcaaagctgccgtgacctcgcgcatcatcaacagttaagtcaggaacgcgccgcccgtgcggaactgctgcaataccaattaaaagaacttaacgaatttaatccgcagcccggagagtttgaacaaatcgacgaagagtacaaacgtctggcgaacagcggtcaattgctgaccaccagccagaatgcattggcattaatggccgacggtgaagacgcaaacctgcaaagtcagctttacacggctaaacaactggtgagcgaattgattggcatggacagcaaactgtccggcgtacttgatatgctggaagaagctaccatccagattgctgaagccagcgatgaactgcgccactactgcgatcgtctggatctcgatcccaaccgactatttgaacttgaacagcgcatcagtaaacagattagcctggcacgtaaacatcacgtcagccctgaggcattgccacagtattaccagagcctactggaagaacagcagcaactggacgatcaggccgacagtcaagaaacgcttgcgctggcggtaacgaaacatcatcagcaggcactggaaatcgcgcgcgcattacaccaacaacgccagcaatatgcagaagaacttgcacagctgatcaccgacagtatgcatgcgctcagtatgccgcatgggcagtttacgatcgatgttaaatttgacgagcatcacctgggcgctgacggtgccgatcgtattgagtttcgggtaaccaccaacccaggtcagccaatgcagcctattgccaaagtcgcatccggtggtgaattgtcccgcatcgcactggcaatccaggtcatcacggcgcgtaaaatggaaaccccggcactgatttttgatgaagtggatgtagggattagcggtccaacagcggcagttgtcggcaaactgctgcgtcaactcggcgaaagtactcaggtgatgtgtgttacccacctgccacaagtcgcgggatgtggtcatcaacactattttgtcagcaaagaaaccgatggtgcgatgacagaaacgcatatgcaatccctgaataaaaaagcgcggttacaagagctggcgcgcctgcttggtggcagtgaagtcacacgtaatacactggcgaatgcgaaagaactgcttgcagcgtaaacttttttcctgcttcacggtcagagtaaacagcaaaacgccgtaagaccggaaagcaaaaggttttaaagtgatgaaaggtctattatcatcggcatattacagatgagccacgtactgctcgggcccgaaaaggaatcaaatcactatgcgctgtaaaacgctgactgctgcagcagcagtactattgatgttgaccgcaggctgttccactctggagcgagtggtttaccgtcctgacatcaaccaggggaactatctgaccgctaacgacgtatccaaaatacgtgttggcatgacgcaacaacaagttgcgtacgcattgggtacaccgctgatgtccgatccatttggtacgaatacctggttctatgtcttccgccagcaaccaggtcatgaaggtgtaactcagcaaacgctgacgctgacctttaacagtagcggtgtgttgaccaatattgataacaaacctgcgctgagtggtaactaataataaagttgctctcaaagacgttaaaaaaggtgctcaatgagcaccttttttctgtctgttatttattcgcacttttttctgctcgttgcctgcgaagctctttcggatcggcaatgagagggcgataaatctccacccgatcgccatcatgcacactatcgcttagttttgccggacggctgtaaatgccgactttgtttttagttaaatcgatatcggtacgcaattccagcaagccactggcgcgaatagcttcttcaaccgtcgcgccctcctgcagcgtcactcgctgcaggtactgcttctcaggtagcgcataagccacctcaacggcaattttacctggcactgtaaacctctttcgcacgaaccgtaaaagcctggaccatattagccgccagctctttaaacacgcgaccaaaggcgagttcaatcaacttattggtaaactcaaagtcgagatgaaactcgatacgacacgcctcctggctcagcggcgtaaacttccatccaccaatcaatttcttgaacggcccatccaccagattcataagaatactttggttactggtcaactggttgcgggtagtaaacgttttgctgatcccagccttagagacatctaccgccgcagtcatctgcccaggagtggactccagaatccgacttccggtacaacccggcaaaaactgaggataagactgaacgtcattcactaactgatacatttgctccgcgctgtagggtaccagtgcggtccggctaatctgaggcataacaatttccatcaacaaaaatccaacaaataatatcatttatcctgctgtaaaaaaaacgctatcccggcgctgggtaacatcgggttcatgctaagatagagccttgtcccccgcaggattgatatggggtgttttcgatttcagattaccgatgattcacgacgcttatgacgaagaaaaaagcacataaacctggtagtgcgaccatcgcgcttaacaagcgcgcccgtcacgaatactttatcgaagaagagttcgaagcgggacttgccctgcaaggctgggaagttaaatccctgcgcgcaggaaaagccaatatcagcgacagctacgtccttctgcgtgacggagaggcatttctgtttggcgctaacatcacgccaatggccgtggcctccacgcatgtggtgtgcgatcctacccgtacccgcaagttacttctcaaccagcgcgaactggacagtttgtacggtcgcgtcaatcgagaaggctataccgtagtggcgctctccctgtactggaaaaatgcctggtgcaaagtgaaaatcggcgtcgccaaaggtaagaaacagcacgataaacgtagtgatatcaaagagcgcgaatggcaggtggataaagcacgtatcatgaaaaacgcccaccgttaaacctgcactccaattattgaccagttcctcaccgcgcctccctctccggcggcgcgaatgaacatcttattggctatcacatccgacacaaatgttgccatcccattgcttaatcgaataaaaatcaggctacatgggtgctaaatctttaacgataacgccattgaggctggtcatggcgctcataaatctggtatacttacctttacacattggggctgattctggattcgacgggatttgcgaaacccaaggtgcatgccgaggggcggttggcctcgtaaaaagccgcaaaaaatagtcgcaaacgacgaaaactacgctttagcagcttaataacctgcttagagccctctctccctagcctccgctcttaggacggggatcaagagaggtcaaacccaaaagagatcgcgtggaagccctgcctggggttgaagcgttaaaacttaatcaggctagtttgttagtggcgtgtccgtccgcagctggcaagcgaatgtaaagactgactaagcatgtagtaccgaggatgtaggaatttcggacgcgggttcaactcccgccagctccaccaaaattctccatcggtgattaccagagtcatccgatgaagtcctaagagcccgcacggcgcaagccctgcgggcttttttgtgccctcaatttgtcccgcgaagtccgaagagaactaattaaatccgaaccttttaggcccattgataggcccaacgaaaagctctattgtttacgttgggctaaacgcagggagactccccacctttgaaaacaggatgtagcgatgaaacttaacgacagtaacttattccgccagcaggcgttgattaacggggaatggctggacgccaacaatggtgaagccatcgacgtcaccaatccggcgaacggcgacaagctgggtagcgtgccgaaaatgggcgcggatgaaacccgcgccgctatcgacgccgccaaccgcgccctgcccgcctggcgcgcgctcaccgccaaagaacgcgccaccattctgcgcaactggttcaatttgatgatggagcatcaggacgatttagcgcgcctgatgaccctcgaacagggtaaaccactggccgaagcgaaaggcgaaatcagctacgccgcctcctttattgagtggtttgccgaagaaggcaaacgcatttatggcgacaccattcctggtcatcaggccgataaacgcctgattgttatcaagcagccgattggcgtcaccgcggctatcacgccgtggaacttcccggcggcgatgattacccgcaaagccggtccggcgctggcagcaggctgcaccatggtgctgaagcccgccagtcagacgccgttctctgcgctggcgctggcggagctggcgatccgcgcgggcgttccggctggggtatttaacgtggtcaccggtagcgcgggcgcggtcggtaacgaactgaccagtaacccgctggtgcgcaaactgagctttaccggtagcaccgaaattggccgccagttaatggaacagtgcgcgaaagacatcaagaaagtgagcctggagctgggcggtaacgcgccgtttatcgtctttgacgatgccgacctcgacaaagccgtggaaggcgcgctggccagcaaattccgcaacgccgggcaaacctgcgtctgcgccaaccgcctgtatgtgcaggacggcgtgtatgaccgttttgccgaaaaattgcagcaggcagtgagcaaactgcacatcggcgacgggctggataacggcgtcaccatcgggccgctgatcgatgaaaaagcggtagcaaaagtggaagagcatattgccgatgcgctggagaaaggcgcgcgcgtggtttgcggcggtaaagcgcacgaacgcggcggcaacttcttccagccgaccattctggtggacgttccggccaacgccaaagtgagcaaagaagagacgttcggccccctcgccccgctgttccgctttaaagatgaagctgatgtgattgcgcaagccaatgacaccgagtttggccttgccgcctatttctacgcccgtgatttaagccgcgtcttccgcgtgggcgaagcgctggagtacggcatcgtcggcatcaataccggcattatttccaatgaagtggccccgttcggcggcatcaaagccagcggtctgggtcgtgaaggtagcaagtatggcatcgaagattacttagaaatcaaatatatgtgcatcggtctttaactggagaatgcgaatgaacagcaataaagagttaatgcagcgccgcagtcaggcgattccccgtggcgttgggcaaattcacccgattttcgctgaccgcgcggaaaactgccgggtgtgggacgttgaaggccgtgagtatcttgatttcgcgggcgggattgcggtgctcaataccgggcacctgcatccgaaggtggtggccgcggtggaagcgcagttgaaaaaactgagccacacctgcttccaggtgctggcttacgagccgtatctggagctgtgcgagattatgaatcagaaggtgccgggcgatttcgccaagaaaacgctgctggttacgaccggttccgaagcggtggaaaacgcggtaaaaatcgcccgcgccgccaccaaacgtagcggcaccatcgcttttagcggcgcgtatcacgggcgcacgcattacacgctggcgctgaccggcaaggtgaatccgtactctgcgggcatggggctgatgccgggtcatgtttatcgcgcgctttatccttgcccgctgcacggcataagcgaggatgacgctatcgccagcatccaccggatcttcaaaaatgatgccgcgccggaagatatcgccgccatcgtgattgagccggttcagggcgaaggcggtttctacgccagcagcccagcctttatgcagcgtttacgcgctctgtgtgacgagcacgggatcatgctgattgccgatgaagtgcagagcggcgcggggcgtaccggcacgctgtttgcgatggagcagatgggcgttgcgccggatcttaccacctttgcgaaaagcatcgcgggcggcttcccgctggcgggcgtcaccgggcgcgcggaagtaatggatgccgtcgctccaggcggtctgggcggcacctatgcgggtaacccgattgcctgcgtggctgcgctggaagtgttgaaggtgtttgagcaggaaaatctgctgcaaaaagccaacgatctggggcagaagttgaaagacggattgctggcgatagccgaaaaacacccggagatcggcgacgtacgcgggctgggggcgatgatcgccattgagctgtttgaagacggcgatcacaacaagccggacgccaaactcaccgccgagatcgtggctcgcgcccgcgataaaggcctgattcttctctcctgcggcccgtattacaacgtgctgcgcatccttgtaccgctcaccattgaagacgctcagatccgtcagggtctggagatcatcagccagtgttttgatgaggcgaagcagtaacgccgctcctatgccggaggcgacgctgcgcgtcttgtccggcctacggggatccaggtcggataaggcgtttacgccgcatccgacaatctgtacgtgaacaggaagaaatctatgttggccgggtaaggcggagccgctctccggcaaaaagaatcaataacaattatacgcgtgacccggcgcgggaaatgtcggggcgctctcccaagtgacacactttcgagaggattcaggatggggcaaagtagccaaccacatgagttaggcggcgggctgaagagtcgccacgtcaccatgttgtctattgccggtgttatcggcgcaagtctgtttgtcggttccagcgtcgccatcgccgaagcgggcccggcggtattactggcctatctgttcgccgggctactggtggttatgattatgcggatgttggcggaaatggcggttgccacgcccgataccggtagcttttccacctatgccgataaagccattggtcgctgggcgggctataccatcggctggttgtactggtggttttgggtactggttatcccgctggaagccaacatcgccgccatgatcctgcacagttgggttccaggcattcccatctggttattttccctcgtcattaccctcgccttaactggcagtaacttattaagcgttaaaaactacggcgaatttgagttctggctggcgctgtgcaaagtcatcgctatcctggcctttattttccttggtgcagtcgcaattagcggtttttacccgtatgccgaagtgagcgggatcagtagattgtgggatagcggcggctttatgcccaacggtttcggtgcggtattaagcgcgatgttgatcaccatgttcagctttatgggcgcagaaattgtcaccattgccgccgcggaatccgacacgccggaaaaacatattgtccgcgccaccaacagcgttatctggcgtatttctatcttctatttatgttctatttttgtcgtcgtggcattaattccgtggaatatgcccggactaaaagccgtcggttcttatcgcagcgtactggaattgctcaatattccccatgcgaaattaatcatggactgcgtgatattactttccgtaaccagttgcctgaacagcgcgctgtataccgcgagtaggatgctctactccttaagtcgtcgcggtgatgctcccgcggtaatgggtaaaatcaaccgcagtaaaaccccgtacgtggcggtgttactctccaccggcgcggcattcttaacggtggtggtgaactattacgcgcctgcgaaggtatttaaatttctgatcgacagctccggcgctatcgccctgctggtttatttagtcatcgccgttagtcagttgcggatgcgcaaaattctgcgagcagaaggaagcgaaattcgcttgcgaatgtggctttatccgtggctcacctggctagtcatcggctttattacctttgtgttggtagtgatgctattccgtccggcgcaacagttagaagtgatctccaccggcttattagcgatagggattatctgtaccgtgccaattatggctcgctggaaaaagctggtattgtggcaaaaaacacccgttcataatacgcgctgatcatgatcaggagtcacaccatgaccattacgtctctggatggctatcgctggctgaagaacgatattattcgcggtaattttcaaccggatgaaaaattacgaatgagtttgctgacaagccgttatgcacttggcgttgggccgttacgggaagctcttagccaactggtggcggaacggctggtcacggtggtgaatcaaaaagggtatcgggtggcgtctatgagtgagcaggagctgctcgatattttcgacgcccgcgccaatatggaagcgatgttagtgagtctggcgattgcccgcggtggcgatgagtgggaggcagacgttctcgcaaaagcgcatctgctgagtaagcttgaggcctgtgacgccagcgagaaaatgcttgatgagtgggatctgcgtcatcaggcgtttcatacggcaattgtggcgggctgtggttctcactatttgctgcaaatgcgtgaacggttgtttgatctggcggcgcgttatcgatttatctggctgcggcgaacggtgcttagcgtggaaatgctggaggataaacacgatcagcaccagaccctgactgcggcggtactggcgcgagataccgcgcgcgccagtgagttaatgcgccagcatttactgacgccaattcccattatccagcaggcgatggctggcaattaattactcttccggaatacgcaacacttgccccggataaattttatccgggctttttagcatcggtttattcgcttcgaagattttattgtacagattagcgttaccgtagacctgtttggaaatggcactcagagtgtcgccagacttaacggtataaaactggctggcagtggctggtgtcgccgttttcacctgatcatcgacactggcaataccggaaatattccccaccgcaacaaggattttctccttcgcctcctgactcaggccgtcaccagtgaccgtcgctttgccgtcggcaatttgaatattcactttatcggcatccggtataccggttttgttcagatgctcctgcaccttcttcgcctgatcgtctttatcgtgctgacctgtaaccgcgtcccagagtttttctccggcatctttcacaaaattgaacagacccatagctacctcattcgttaacggaaacactcagaaagtgtagcagaggaacgcggcgcgttaacgccgcggggatgagcacaggtttaatcgcgggtttgcacccagaacgcgtgaatcaaaccggggatatacccaagcagtgtcaacagaatattaataatgaacgcccaaccgaaccctttaccgagcagcacgccgagcggcggcagaatgatggtgatgacgattctccagaaacccatatgtactccctataagaaaattactcattgtttaaaaagagattttatctcttaagcgtagtaattttagcggagcctgccagtttcagcttacgcttttactctcatttacgctgctgaggctggtatatgttgcatttttagtttagagtttacttaatttagaaaatacttaaataaatatgactgaactcgcgcaattacaggccagtgccgaacaggcagcggccttattgaaagcaatgagccaccctaaacgattgctgattctgtgcatgcttagcggttcccccggcaccagcgcgggagagctgacgcgcattaccggactgagtgcctctgcgacaagtcagcatctcgctcgtatgcgggacgaagggcttatcgacagccaacgggatgcccaacgcattctatattccattaaaaatgaggcggtaaatgccattatcgccaccctgaaaaatgtctattgtccgtaaggagtcactatggctttgacaaccattagcccgcatgatgcacaagaattaatcgcacgcggcgcaaagttaatcgatattcgtgatgctgatgaatatcttcgtgaacatattcctgaagcagatctggctccattatccgtgctggaacagagtggtcttccggctaaattacgtcacgagcaaattatattccactgccaggcaggtaaacgcaccagtaataatgccgataaattagcagcgattgccgcccccgcagaaatctttttactcgaagatgggattgatggctggaaaaaagcaggattgccagtagcggtaaataaatctcaacccttgccgttaatgcgccaggtgcagatcgctgcgggtggtttaatattaatcggcgttgtactgggttataccgtaaatagcggtttcttcttattaagtggctttgttggtgccgggttactgtttgcaggaatcagcggtttttgtggaatggcaaggttgttagataagatgccgtggaaccaacgagcttgagaagcgacgccggacgcgccctagcagcgacatccggcctcagtaattagatcaggaaatcgtcgagagatttaccttctgccagcgcctgagcaattggcttcggtgtacggccctgaccggtccaggttttagtttcaccgttaacatcggtgaatttatatttcgccggacgcggctggcgttttttaccagcgcgtggtgcagcagcagagctattacccaataactcttccgggttaattccgtcagctttcatcagctccagccaggtgctaattttttcctggcgctctgccagttcacgctgctgctgttcttcttcttcacgtctttctttagtgacaaccctgaatttttcgagcatttcttcaagaacgtcaatggagaattcgcgagccatcgcacggagggtgcgaatgttatttaaactttgtaacattacggacataataaagaaaaccttttaacgccaaaacaaaaaaagtatttcgtcgcgtagtgtaagcgatcacttattatatttccacaaaatttaatctatttacagtcctgcgcgagattatttcagctgttattttctgaaactctcagaataatttcaagattatatattagccattttgatgagtaatttagattattggtgaacagagcggcgctctctgctcgctaattccgcaagcctgacaaaatcaaagtgaataaaaatgcaatataacagaataaaagaaaacatccatcactggtgctttctgctgttaatgtacattgtctggcataaaaaatgctgaaaatgacccagctactacatacaccgaattctctacgcttatagcgttacctcacccccaaactttcattagtgatattaaaggtaaggccatatctaattgatttaattaaaaataaatcatatcggcatgtaaaaatccacaatgtacaaaaaacgagccgttacggaatattttatctacaaaaactgactaaataaaaatttttcactaattgattagtcatagccagcgatatacgctatgcgaaaatgcagatggcaatgagatccactgctttcatctccattaacatcccattacgcttttattaaggagcattagcatgttcagtccgcagagtcgcttgcgtcatgcagttgcagatacgttcgcgatggttgtttactgttctgtcgtgaacatgtgtattgaagttttcctctccggaatgagcttcgaacagtctttttattccagattggtagcgattccggtgaacatcttaattgcatggccatacggtatgtaccgtgatctgtttatgcgcgcggcacgcaaagttagcccgagcggctggataaaaaatctggcggatatcctggcttatgtgacgttccagagtccggtgtatgtggcgatcttgttagtggtgggcgcagactggcatcagattatggcggcggtcagtagtaacatcgttgttagcatgttgatgggggcggtttatggctacttcctcgattattgccgccgactgtttaaagtcagccgttaccagcaggtaaaagcctgactcttcttttcgcgactggcatcgccagtcgcgtctttaactggcttcgccaaataaaccattcaaataacgttcaagcgcaacacggctactaaagccatgcgggataccgtaatgctcgtgtcgctcgcctgctaaatagagcggaaattgctggtaatgatcgcaagttttaatatcggaagcgggttcagccagtgtgctactgcgttcttttaatgttggatgaattaccagagcggtacgtcccattcgcgcttcgcgattaacatagacataattttccccacggcggtaaccatacgctttctgggttaccacatcgacagtaaaaccgactttttcaagtacgcgcgccacctcgtctggtcgtaaatacatatttgatcctcgttattatcaaccgcgggcctaccttacctgattgcgcattcacaacgctttcagaaaagtccataaagccgcgatgaacctcagttaagaaaattatggtctacactgaaaattacatcgaattctaatgggggatcatatgtttaaccgaccgaaccgcaacgacgttgatgatggcgtgcaggatatccagaatgatgtcaatcaattagctgacagcctcgaatctgtattgaagtcctggggcagcgacgccaaaggggaagctgaagccgcacgcagtaaagctcaggcattgctgaaagaaaccagggcgcgaatgcatggtcgtactcgcgtccagcaagccgcgcgcgatgccgttggctgcgcggattcttttgttcgtgaaagaccctggtgtagcgtgggtacagcagctgcggtaggtatttttatcggcgcactgttaagcatgcgcaaaagctaatgcaaaaatgataataaatacgcgtctttgaccccgaagcctgtcttcggggtttctttttgcctggtgaatcacaaaaatccccctaccccgtcacgctcatatccagggtaatttcgaccactatttgctatatattgtgtggttgaatcttttttcaactacatctagtatctctgtatcaacagagagacaacccgacgcgtatcatcgcgccgtatcttcattttaaacggaaatacgaatcatgcgcattactatttacactcgtaacgattgcgttcagtgccacgccaccaaacgggcgatggaaaaccggggctttgattttgaaatgattaatgtcgatcgcgttcctgaagcggcagaagcgttgcgtgctcagggctttcgtcagttgccggtagtgattgctggcgatcttagctggtctggtttccgtccggacatgattaaccgtctgcatccagcgccacacgcggccagtgcatgagccagctcgtctacttctccagcagctccgaaaacacgcagcgttttatcgaacgtttaggtctgcccgcggtgcgcatcccgctcaatgagcgggaacggattcaggtagacgagccttacatcctgatcgtgccctcttacggcggcggcggtacggctggcgcggtgccacgacaggtaattcgctttttaaacgacgagcacaaccgggcgttgcttcgcggcgttattgcttctggtaatcgcaactttggtgaggcgtatggccgcgccggagatgtgattgcccggaaatgcggcgtgccgtggctgtaccgttttgaactcatgggtacgcaaagcgatatcgaaaacgttcgtaaaggagtaaccgaattttggcaacgacaaccgcagaatgcctgacgcaggaaacgatggattaccacgcgctgaatgcgatgcttaacctctacgatagcgcaggtcgcattcagttcgataaagaccgccaggccgttgacgcctttattgcgacgcatgtgcgtccgaacagtgtgaccttcagtagccagcagcagcgcctgaactggctggtcaacgaaggttactatgatgaaagcgttcttaatcgctactctcgcgactttgtcattacgctgtttacccacgcacacaccagcggttttcgtttccagacattcctcggggcatggaagttttacaccagctatacgttgaagacattcgacggtaaacgttatctggaagattttgccgatcgagtaacgatggtggcgctgacgctggcacaaggcgatgagacgctggcgttgcaactgaccgatgaaatgctgagtggacgctttcagccagccacgccaacattcctcaactgcggtaagcagcagcgcggcgaactggtttcctgttttttgctgcgtattgaagacaatatggagagcattggtcgggcggtaaattccgcactgcagctgagcaaacgcggcggcggcgtagcatttttgctgagcaatctgcgagaagcgggcgcgccaattaaacgtattgaaaatcaatcttctggcgtaattccggtgatgaaaatgctggaagacgcattttcctatgccaaccaactcggcgctcgtcagggggctggtgcagtctatttacatgctcatcatcccgatattctgcgttttctcgacacgaaacgggaaaatgccgacgaaaaaatccgcattaaaacactgagccttggcgtggtgatcccggatatcactttccatctggcaaaagagaatgcgcagatggcgctgtttagcccttatgacgtagagcgagtttatggcaagccgtttgccgatgtggccatcagccaacactatgacgaactggttgccgatgaacgcattcgcaaaaaatacctcaacgcccgtgatttcttccagcgactggcagaaatccagtttgagtccggctatccctacatcatgtatgaagacacggtaaaccgtgctaaccctatcgccgggcgcataaatatgagtaatctctgcagtgaaattttgcaggttaacagcgccagtgagtatgacgagaatctcgactatacccgcacaggccatgatatttcctgcaatttaggtagcttgaatattgcgcacaccatggattcccccgattttgcccgcacggtagagactgccgtgcgcggtttaacggcagtaagtgatatgagtcatatccgcagcgtgccgtccatcgaagccggaaatgccgccagccacgccatcggactggggcagatgaatttacacggctatctggcgcgagaaggcatcgcttatggtagcccggaagcactggatttcaccaatctctatttctatgccatcacctggcatgcactgcgtaccagcatgttgctggcacgcgaacgcggtgaaaccttcgccgggttcaaacagagtcgctatgccagtggtgaatattttagccaatatctgcaagggaactggcagccgaaaacggcgaaagttggcgaactgtttacccgtagcggtattacgttacctacccgtgagatgtgggcgcagctgcgcgacgacgtgatgcgctacggcatatacaaccagaatcttcaggcggtgccgccaaccggttctatctcttatatcaaccatgctacgagcagtattcatccgattgtggcgaaagtagagatacgcaaagagggcaaaacaggacgcgtttactaccctgccccgtttatgactaacgagaatctggcgctgtatcaggacgcttacgaaattggcgcagaaaagatcatcgacacctacgcggaagcgactcgccatgtcgatcaggggctgagcctgacgctttttttccccgataccgccaccactcgcgatatcaacaaagcgcagatttacgcctggcgcaagggtatcaaaacgctctattacatccgcctgcgtcagatggcgctggaaggcactgaaattgaaggctgcgtctcctgtgcactttaaggaatatctatgaaactcagtcgtatcagcgccatcaactggaacaagatatctgacgataaagatctggaggtgtggaatcgcctgaccagcaatttctggctaccagaaaaggtgccgctgagcaacgatattcctgcctggcagacattaactgtcgtagaacaacaactgacgatgcgcgtttttactggcctgacgctgctcgacacgctgcaaaatgttatcggcgcgccttctctgatgcccgatgcactcacgcctcatgaagaagcggtattaagcaatatcagctttatggaagcggttcatgcccgctcttacagtagcattttcagcacgctatgccagaccaaagatgtcgatgccgcctacgcctggagtgaagaaaacgcaccgttgcagcgaaaagctcagattattcagcaacattatcgcggtgatgatccgctgaaaaagaaaatcgccagtgtgtttcttgaatcttttttgttctattccggtttctggctgccgatgtatttttccagccgcggaaagctgaccaataccgcggacctgatccgtctgattatccgcgatgaagcagtccacggttactacataggctataaatatcagaaaaacatggaaaagatatctctgggacaacgtgaagagttgaagagtttcgccttcgatttgttgctggaactctacgacaacgagttgcaatacaccgatgagctgtacgccgaaaccccgtgggctgacgatgtgaaagcgtttctctgttacaacgccaataaggctttgatgaatctgggctacgaaccgttatttcccgcagaaatggcggaagtgaatccggcaatcctcgccgcgcttagcccgaatgccgatgaaaatcacgatttcttttccggtagtggctcctcttatgtgatggggaaagcggttgaaacagaagatgaagactggaatttctgagggtgttattttcaaaaatatcactacccgcagcagggaaataattcccgccaaatagctttttatcacgcaaataatttgtggtgatctacactgatactctgttgcattattcgcctgaaaccacaatattcaggcgttttttcgctatctttgacaaaaaatatcaactttctcgatttgctctcagcccttatatcacgggaaattccggcgatttgctcgcatcaatattcatgccacatttgccatcaggggttgcctcagattctcagtatgttagggtagaaaaaagtgactatttccattgggtaatatatcgacatagacaaataaaggaatctttctattgcatggcaattaaattagaaattaaaaatctttataaaatatttggcgagcatccacagcgagcgttcaaatatatcgaacaaggacttagtaaagaacaaattctggaaaaaactgggctaagccttggcgtaaaagacgccagtctggccattgaagaaggcgagatatttgtcatcatgggattatccggcagcggtaaatccacaatggtacgccttctcaatcgcctgattgaacccacccgcgggcaagtgctgattgatggtgtggatattgccaaaatatccgacgccgaactccgtgaggtgcgcagaaaaaagattgcgatggtcttccagtcctttgccttaatgccgcatatgaccgtgctggacaatactgcgttcggtatggaattggccggaattaatgccgaagaacgccgggaaaaagcccttgatgcactgcgtcaggtcgggctggaaaattatgcccacagctacccggatgaactctctggcgggatgcgtcaacgtgtgggattagcccgcgcgttagcgattaatccggatatattattaatggacgaagccttcagcgcgctcgatccattaattcgcaccgagatgcaggatgagctggtaaaattacaggcgaaacatcagcgcaccattgtctttatttcccacgatcttgatgaagccatgcgtattggcgaccgaattgccattatgcaaaatggtgaagtggtacaggtcggcacaccggatgaaattctcaataatccggcgaatgattatgtccgtaccttcttccgtggcgttgatattagtcaggtattcagtgcgaaagatattgcccgccggacaccgaatggcttaattcgtaaaacccctggcttcggcccacgtagcgcactgaaattattgcaggatgaagatcgcgaatatggctacgttatcgaacgcggtaataagtttgtcggcgcagtctccatcgatagccttaaaaccgcgttaacgcagcagcaaggtcttgatgcggcgctgattgatgcgccgttagcagtcgatgcacaaacgcctcttagcgagttgctctctcatgtcggacaggcaccctgtgcggtgcccgtggtcgacgaggaccaacagtatgtcggcatcattagcaaaggaatgctgctgcgcgctttagatcgtgagggggtaaataatggctgatcaaaataatccgtgggataccacgccagcggcggacagtgccgcgcaatccgcagacgcctggggtacaccgacgactgcaccgactgacggcggtggtgctgactggctgaccagtacgcctgcgccaaacgtcgagcattttaatattctcgatccgttccataaaacgctgatcccgctcgacagttgggtcactgaagggatcgactgggtcgttacccatttccgtcccgtcttccagggcgtgcgcgttccggttgattatatcctcaacggtttccagcaattgctgctgggtatgcccgcaccggtggcgattatcgttttcgctctcatcgcctggcagatttccggggtcggaatgggtgtggcgacgctggttagcctgattgccatcggcgcaatcggtgcctggagccaggcaatggtgactctggcgctggtgttaaccgccctgctgttctgtatcgtcatcggtttgccgttggggatatggctggcgagaagtccgcgagcggcgaaaattattcgtccactgcttgatgccatgcagaccacgccagcgtttgtttatctggtgccaatcgtcatgctatttggtatcggtaacgtgccgggcgtggtggtgacgatcatctttgctctgccgccgattatccgtctgaccattctggggattaaccaggttccggcggatctgattgaagccagccgcagtttcggtgccagcccgcgccagatgctgttcaaagttcagttaccgctggcgatgccgaccattatggcgggcgttaaccagacgctgatgctggccctttctatggtggtcatcgccagcatgattgccgtcggcgggttgggtcagatggtacttcgcggtatcggtcgtctggatatggggcttgccaccgttggcggcgtcgggattgtgatcctcgccattatcctcgatcgtctgacgcaggccgttgggcgcgacagtcgcagtcgcggcaaccgtcgctggtacaccactggccctgttggtctgctgacccgcccattcattaagtaactctgcacttgcccggtgacgccgggcattatcaccctgccaaaaaaaggaataacaatgcgacatagcgtactttttgcgacagcgtttgccacgcttatctctacacaaacttttgctgccgatctgccgggcaaaggcattactgttaatccagttcagagcaccatcactgaagaaaccttccagacgctgctggtcagtcgtgcgctggagaaattaggttataccgtcaacaaacccagcgaagtagattacaacgttggctacaccagccttgcttccggcgatgcaaccttcaccgccgtgaactggacgccactgcatgacaacatgtacgaagctgccggtggcgataagaaattttatcgtgaaggggtatttgttaacggcgcggcacagggttacctgatcgataagaaaaccgccgaccagtacaaaatcaccaacatcgcacaactgaaagatccgaagatcgccaaactgttcgataccaacggcgacggaaaagcggatttaaccggttgtaaccctggctggggctgcgaaggtgcgatcaaccaccagcttgccgcgtatgaactgaccaacaccgtgacgcataatcaggggaactacgcagcgatgatggccgacaccatcagtcgctacaaagagggcaaaccggtgttttattacacctggacgccgtactgggtgagtaacgaactgaagccgggcaaagatgtcgtctggttgcaggtgccgttctccgcactgccgggcgataaaaacgccgataccaaactgccgaatggtgcgaattatggcttcccggtcagcaccatgcatatcgttgccaacaaagcctgggccgagaaaaacccggcagcagcgaaactgtttgccattatgcagttgccagtggcagatattaacgcccagaacgccattatgcatgacggcaaagccagtgaaggcgatattcagggacacgttgatggttggatcaaagcccaccagcagcagttcgatggctgggtgaatgaggcgctggcagcgcagaagtaatttttattcgggcggataaggcgtttttgccgcatccgccgttctgtgcacaatgcctgatgcgacgctggcgcgtcttatcatgcctacaaaccacatcgcacatttcaacaatctatctttcatcccatattcatcaacatccgctattattgatttccagcttaatcatcacctgatgaacaaaaataatgactaaacctaatcatgagcttagcccggcgctgatcgtgctgatgtctatcgccaccggtctggcggtagccagtaactattacgcccagccattgctcgacaccatcgcgcgtaacttttccctttccgccagtagcgcaggctttattgttaccgccgcgcagttgggctatgccgcaggtctactgtttcttgttcccctcggtgatatgtttgaacgccgccgcctgattgtcagcatgaccttactggcggcatgttgattaccgccagcagtcagtcgctggcgatgatgatcctcggtacggcattaaccggtttattcagtgtcgtggcacaaattctggttccgctggcagcgacgctggctagtccggataaacgcggcaaagtggttggcactattatgagcggtctgctgttggggatcttgctggcacggacagttgccggattgctggcgaatctcggcggctggcgcaccgtcttttgggttgctagcgtgttaatggcactgatggcgctggcattatggcgtggtctgccacaaatgaaaagtgaaacccacctcaactacccacagttgttgggttccgttttcagtatgtttatcagcgataaaattctgcgtacccgcgcgttgctgggctgcctgacctttgccaatttcagcattctctggaccagtatggcctttttgcttgccgctccaccttttaactacagcgatggtgtcattggtctgtttggacttgcgggagctgccggagcgttgggcgctcgtccggcgggcggttttgccgataagggcaaaagccaccacaccacaactttcggtctgctgctgctattacttagttggctggcgatctggtttggtcacacttccgtactggcgttgattatcggaatcctggtgctggatctcaccgtgcagggcgtgcatatcactaaccagacggtaatttatcggatacatcctgatgcgcgcaatcgcctgaccgcaggttacatgactagctactttattggcggtgccgccggtagcctaattagtgccagtgcctggcaacatggcggttgggctggcgtttgtctggctggcgcgacgattgccctggttaacttactggtctggtggcgaggttttcatcgtcaggaagccgcaaattaagcaatcagcaaccgttttcgtggctttacacttataagggtgttaagaagcccatcagtctgataaggttaagatattcattcagtctatttataatattaacaatcgttaagcgtacactctatggaaagccctactccacagcctgctcctggtagcgcgaccttcatggaaggatgcaaagacagtttaccgattgttattagttatattccggtggcctttgcgttcggtctgaatgcgacccgtctgggattctctcctctcgaaagcgtttttttctcctgcatcatttatgcaggcgcgagccagttcgtcattaccgcgatgctggcagccgggagtagtttgtggattgctgcactgaccgtcatggcaatggatgttcgccatgtgttgtatggcccgagtctgcgtagccgtattattcagcgtctgcaaaaaagcaaaaccgccctgtgggcgtttggcctgacggatgaggtttttgccgccgcaaccgcaaaactggtacgcaataatcgccgctggagcgagaactggatgatcggcattgccttcagtagttggagtagctgggtatttggtacggtaataggggcattctccggcagcggcttgctgcaaggttatcccgccgttgaagctgcattaggttttatgcttccggcactctttatgagtttcctgctcgcctctttccagcgcaaacaatctctttgcgttaccgcagcgttagttggtgcccttgcaggcgtaacgctattttctattcccgtcgccattctggcaggcattgtctgtggctgcctcactgcgttaatccaggcattctggcaaggagcgcccgatgagctatgaggttctgctgcttgggttactagttggcgtggcgaattattgcttccgctatttgccgctgcgcctgcgtgtgggtaatgcccgcccaaccaaacgtggcgcggtaggtattttgctcgacaccattggcatcgccagcatatgcgctctgctggttgtctctaccgcaccagaagtgatgcacgatacacgccgtttcgtgcccacgctggtcggcttcgcggtactgggtgccagtttctataaaacacgcagcattatcatcccaacactgcttagtgcgctggcctatgggctcgcctggaaagtgatggcgattatataacccacaagaatcatttttctaaaacaatacatttactttatttgtcactgtcgttactatatcggctgaaattaatgaggtcatacccaaatggatagtagctttacgcccattgaacaaatgctaaaatttcgcgccagccgccacgaagattttccttatcaggagatccttctgactcgtctttgcatgcacatgcaaagcaagctgctggagaaccgcaataaaatgctgaaggctcaggggattaacgagacgttgtttatggcgttgattacgctggagtctcaggaaaaccacagtattcagccttctgaattaagttgtgctcttggaagttcccgtaccaacgcgacgcgtattgccgatgaactggaaaaacgcggttggatcgaacgtcgtgaaagcgataacgatcgccgctgcctgcatctgcaattaacggaaaaaggtcacgagtttttgcgcgaggttttaccaccgcagcataactgcctgcatcaactctggtccgcgctcagcacaacagaaaaagatcagctcgagcaaatcacccgcaaattgctctcccgtctcgaccagatggaacaagacggtgtggttctcgaagcgatgagctaacgcgtcatctcgctcaaaaatccagatttataaaagaaaaaatgactggccagcatcgcaacatgctggcctttttggcaagcaggtcggctcagccgatgagttaagaagatcgtggagaacaatatgagcgcaaatgcggagactcaaaccccgcagcaaccggtaaagaagagcggcaaacgtaagcgtctgctcctccttctcaccttgctctttataattattgccgtagcgatagggatttattggtttttggtactgcgtcacttcgaagaaaccgatgacgcatacgtggcagggaatcaaattcaaattatgtctcaggtgtctggcagcgtgacgaaagtctgggccgataacaccgattttgtaaaagaaggcgacgtgctggtcactctcgacccgacagatgctcgccaggcgtttgaaaaagccaaaactgcactggcttccagcgttcgccaaacccaccagctgatgattaacagcaagcagttgcaggcgaatattgaggtgcagaaaatcgccctcgcgaaagcacaaagcgactacaaccgccgtgtgccgctgggcaatgccaacctgattggtcgcgaagagctgcaacacgcccgcgacgccgtcaccagtgcccaggcgcaactggacgtcgcgattcaacaatacaatgccaatcaggcgatgattctggggactaaactggaagatcagccagccgtgcaacaggctgccaccgaagtacgtaacgcctggctggcgctggagcgtactcgtattatcagtccgatgaccggttatgtctcccgccgcgcggtacagcctggggcgcaaattagcccaacgacgccgctgatggcggtcgttccagccaccaatatgtgggtggatgccaactttaaagagacgcagattgccaatatgcgtatcggtcagccggtcactatcaccacggatatttacggcgatgatgtgaaatacaccggtaaagtggttggtctggatatgggcacaggtagcgcgttcagtctgcttccagcgcaaaatgcgaccggtaactggatcaaagtcgttcagcgtctgcctgtgcgtatcgaactggaccagaaacagctggagcaatatccgctgcgtatcggtttgtccacgctggtgagcgtcaataccactaaccgtgacggtcaggtactggcaaataaagtacgttccactccggtagcggtaagcaccgcgcgtgaaatcagcctggcacctgtcaataaactgatcgacgatatcgtaaaagctaacgctggctaatccagaggtgcgtgtgatgcaacagcaaaaaccgctggaaggcgcgcaactggtcattatgacgattgcgctgagtctggcgacattcatgcaggtgctggactccaccattgctaacgtggcgatccccactatcgccgggaatctgggcagtagcctcagccagggaacgtgggtaatcacttctttcggggtggcgaatgccatcagcatcccgcttaccggctggctggcaaagcgcgtcggggaagtgaaactgttcctttggtccaccatcgcctttgctattgcgagctgggcgtgtggtgtctccagcagcctgaatatgctgatcttcttccgcgtgattcaggggattgtcgccgggccgttgatcccgcttagccaaagtctattgctgaataactacccgccagccaaacgcagcatcgcgctggcgttgtggagcatgacggtgattgtcgcgccaatttgcggcccgatcctcggcggttatatcagcgataattaccactggggctggatattcttcatcaacgtgccgattggcgtggcggtggtgttgatgacactgcaaactctgcgcggacgtgaaacccgcaccgaacggcggcggattgatgccgtggggctggcactgctggttattggtatcggcagcctgcagattatgctcgaccgcggtaaagagctggactggtttagtagtcaggaaattatcatccttaccgtggtggcggtggtggctatctgcttcctgattgtctgggagctgaccgacgataacccgatagtcgatctgagcttgtttaagagccgcaacttcaccatcggctgcttgtgtatcagcctcgcgtatatgctctacttcggcgctattgttctgctgccgcagttgttgcaggaggtctacggttacacggcgacctgggcaggtttggcctctgcgccggtagggattattccggtgatcctgagcccgattatcggccgcttcgcgcataaactggatatgcggcggctggtaaccttcagctttattatgtatgccgtctgcttctactggcgtgcctatacctttgaaccaggtatggattttggcgcgagcgcctggccgcagtttatccaggggtttgcggtggcctgcttctttatgccgctgaccaccattacgctgtctggtttgccaccggaacgactggcggcggcaagcagcctctctaactttacgcgaacgctggcggggtctatcggcacgagcataaccacgaccatgtggaccaaccgcgagagcatgcaccatgcgcagttgactgagagcgtaaacccgttcaacccgaatgcccaggcgatgtacagtcaactggaagggcttgggatgacgcaacagcaggcaagtggctggattgcccagcagatcaccaatcaggggctgattatttccgccaatgagatcttctggatgagtgccgggatattcctcgtcctgctggggctggtgtggtttgctaaaccgccatttggcgcaggtggcggcggaggcggtgcgcactaagtacaactaagccagttcatttgaactggcttttttcaattaattgtgaagatagtttactgattagatgtgcagttcctgcaacttctctttcggcagtgccagttcttcgttgctgttgatgcgtacgtcacgttccagaatgctacgcgcaatatcctgcgcttcctgcaagctgtgcatctggtaagtgccacactggtagacgttcagttccgggatctgattctgatcctgcactttcagcacgtcttccattgccgctttccaggcatcagcaacacgctgctcatctggcgtaccaatcagactcatataaaaaccggtgcggcagcccattgggctgatatcgataatctctacaccattaccgttaagatggttacgcataaaaccagcaaacaggtgctccagggtatggatccctctttctggcatcacttctttgttcggcacgcagaagcgcagatcgaacacggtgattgcgtcgccatgcggggtgttcattgttttcgccacccgaactgcaggcgcttccatccgggtatgatcgactgtgaagctatctaacaacggcatttagccacctccggtaatttttttaaaaattttctgaactctttcttcccaggcgagtctgagtatatgaaagacgcgcatttgttatcatcatccctgaattcagagatgaaattttggccactcacgagtggcctttttcttttctgtcaggcgtgtttttccagccacaccgcaaacggttcggtatcagcggcttccatttcctgctgacggcgttcagacgcctcgcgctcggctacaaaatcctcttcgcgcagaatttccagcggctcttcacgcagcagattacggtaggcttctgcaaatgctttgcctgttccgccaataccagtatcaatcatagaccttaagatacgggcagagaaagtcagatcgggattatcgaagcaggcaaccagttcatcacacactttctgatacgcttcgccgccgttaatactatccagcgtttgcgcgacgcgtttcagatcgcggaacagatctttacccacctgcggtaacgggaactgtgcggtttcgcagccgatacccagcgtcagacccggtttgcgaccttcgaggatcacccggttccagttaacgcgtgtacaggcaagttcgctactgctcatttccggtgcatcagccagcgcacaccagaccataaacaggtcgaggaatcgcacctgctgttcatctacaccaatcgggctgaacgggttgatgtccaggctacgcacttcaatatattcaatgccgccacgtaacagcgcatcagaagggctctcgccgctgcgggtaacgcgttttggacgaatcggcgcgtacagttcgttttcaatctgcaacacgttgctgttgatttgcagcctcttaccgtctttctcaataccaatcttcgcgtactcttcgcttggcgttttgattgcctgtttaaggcccgctacgtactcgtaaagatcgttgaaggtaataccaagattgctttggcttttattggtatagccgagatcgctcaaacgaagagaggtcgcatacggcaggtaatacataccgcactcggttttctcaaacggcaggctcgttggttttccttgcaggaaagaagaacaaatcgccggagatgcaccaaacagataaggaatgacccaaccgaaacgatagtaattgcggataacgcggaaatagcccgcagaaattttctctttggcatcagcgccgctgatatcaccgcacttcgcttgccagaatgccattggcaaagagaaattgtagtgcacgccggaaatggtttgcatcagcgcgccgtagcgatttttcagcccttcacgatacagcgttttaaagcgtccggtgttagaagtgccgtactgtgccagttcgatgtcctgaccttctgcgatgtagcatggcatacttaacggccacatccgctcatcgcccatattgcgcgccgtataacgatgcagatcgcgcataaaggtcagcatatgttcaatatcaccatccactggtgtaatgaattccagcaatgcttccgcaaaatcggtagtaatccatttgtgcgtcagtgcggaacctaatgcttcaggatgacctgttgttgccagtgtgccatcagcattaacacgcaaagtttcgcgctccagcccacgctgtatcccctttaacgcctgaggatgtttttccagccaggccagcgcctgacttacgtccgggatcaaattgacctcccgcctgtcaaaatcgttttaattagcataactgtaatggtgaccatatgtgcaggcctacaattagtgccaccacatcatgccctgaacggtcgctgctgcaactgcaacatagcgtaacgctttaccaaggcacaaaaaaaagattaccggtccccagctgatgcgcatccatcccgctaacagacacagtaaatcgccaaccacgggcatccagcttaataatagcgtgactgcaccatagcgtttcagccagccggtagctttctcttgccagcggcttgttttacgcaatggaaagaaacgcccaaggataacgttagttaaccctccaaggctattacccattgttgctgttaaaactaaaacccagggatgactgatcccggaaagcaacattgccaccagcacgacttcggagttgccgggtaatagtgtagcgctgagaaaactactggcaaacaagctgaaaaggcttaacgcttcactcacagcaagcgaacatccacggcgtccatgcctgctgcacgggccgcctgaataccgaaatcggcatcttcaaagaccacacactgcgtcggttgcacgcccatacgctgcgcgcacaacaaaaatgtgtctggcgcgggtttatggtgtttgacgtgatcggcagcgacgacggcgtcaaaataatggcgtaatcccaggtgcgccagcaatgcctcagcgatggcgctttcactccccgttcctacagccattgggcgacgaccatgccaacttttcaccacatcaacaagaggaagcggttcgacgctatccagcagcatacttcttactgcttctgttttttcacgcgctaacgcatgcgggtcgagatcggcctgattcagctcaataattgcctgagcaatacgccaggtggggcttccattaagcgcaatcatcgcctgaatatcgtactgaagaccgtagtgccctaatacttcgcgccacgctttacggtgcgtaggctccgtatccaggattgtgccatccatatcaaaaattaaacctgcataacgctcgtacatggtcttctcgcaagtcgaaaaatatgacgctactttagcgtaattgcttgattttgtcgctgatggcgaaggagaagaaaattcaggaaatggataaaggagttatttagaaatgagatatttttgaaggaaattttttggagaagatggtgcatccgggaggatgactcactgacgttcgcccttcgggccgttgctggcgcaacgttatccttcctggtgcctgcggttaataccgctatctcttcgataccttcattgctgaaggttacggagaatatggtgcatccgggaggattcgaacctccgaccgctcggttcgtagccgagtactctatccagctgagctacggatgcatcgggaaaacttattctactgctgatattgataccgctactaaagccatatcaattaagagatggtgcatccgggaggattactcgccttgcggctcgcccttcgggccgttgctaaagcaacgttatcatccctagtgcctgcggttaattccgctacctcttcgataccttcattgctgaagatttcggagaatatggtgcatccgggaggattcgaacctccgaccgctcggttcgtagccgagtactctatccagctgagctacggatgcatcgggaaatttattttactgctgatattgataccgctactaaagccatatcaagtaagagatggtgcatccgggaggattcgaacctccgaccgctcggttcgtagccgagtactctatccagctgagctacggatgcatcgggaaacttactttactgcagattttttgataccgctactaaagccgtatcaagtaagagatggtgcatccgggaggattactcgccttgcggctcgcccttcgggccgttgctaaagcaacgttatcctccctggtgcctgcggttattaccgccacctcttccataccttcatcgctgaaagtacgtagaatatggtgcatccgggaggattcgaacctccgaccgctcggttcgtagccgagtactctatccagctgagctacggatgcaaatggcggtgaggcggggattcgaaccccggatgcagcttttgaccgcatactcccttagcaggggagcgccttcagcctctcggccacctcaccacacgcctcttacgagtgcttcgaagaacttgtttatcgctcatcgtcgctgcgtggcgcacatattactttctgagacttataagtcaaacaatttttcctacacttttatcgtttgcacacttcacgttcaattagtctgtaaaaacgtcaaaaagagtgttttatcaacagaagaatggaggtctgacagatagtagtaatgcaaaaaaatggagacttaagttgaatgaacgggagtaaagcgaaaagactatagagtgaaggagaaattttgagggtgcgtctcaccgataaagatgagacgcggaaagattagtaactggactgctgggatttttcagcctggatacgctggtagatctcttcacggtgaacagaaacttccttcggggcatttacgccaatacgtacctggttgccctttacccctaaaactgtcacggtgacctcatccccaatcatgagggtctcaccaactcgacgagtcagaatcagcattctttgctccttgaaagattaaaagagtcgggtctctctgtatcccggcattatccatcatataacgccaaaaagtaagcaatgacaaacacattacatctaagcagtcatggcattacattctgttaaacctaagtttagccgatatacacaacttcaacctgactttatcgttgtcgatagcgttaatgcgaatgccgtgaagcgagtccacggcattgcctgacgcttatattattgcaatttcgcgctgacccagcctttcacactggctaacgctgcaggtaaggccgcagcatccgtaccaccggcttgcgccatgtcaggacgtccaccacccttgccgcccacctgctgagcgaccataccaatcagttcccctgctttcacacgatctgtgacgtccttagatacgcctgcaatcagagaaaccttaccttcgactaccgttgccagcacgataattgtgctccccagctgattttttaaatcgtcaaccatggtacgcaacattttcggctcaacaccgctaagctcgctaaccaacagcttaacaccattaacatcaattgccttactggaaagatttgcgctctcctgtgcggcagcttgttctttaagctgttgtaactctttttccagctgacgcgtacgttccagtacactgcgcactttatcagccagattattgctatcgcctttcagcagatgcgcgacttcgcttaagcgatcgctgtctgcatgaacggtggcgatagcaccttctccggttaccgcttcgatacgacgaacgcctgcagcagtaccgctttcagagatgatgcggaacagaccaatatcaccagtgcggctggcgtgagtaccgccacacaactcggtagagaaatcgcccatgctcagcacgcgtacgcgctcatcatacttctcgccgaacagcgccatcgcacctttcgctttcgccgcttcgagatccatgatgttggtttcgatcggcaaattgcgacgaatctgtgtgttcaccaggtcttcgaccgcacgaatctcttctggtttcatcgcttcgttgtgactgaagtcgaagcgcagcaccttgtcgttaaccagactacctttctggcttacatgagtacccagaacctggcgcagcgcagcgtgcatcaggtgcgttgcggagtgattcagacgaatacgggcgcgacgagcctcatcaacatcagcctgcaccgcgtcgcccactttcagagaacccgcagcaagtttaccgatgtgaccaatcgcctggccgtatttctgcgtatcttccaccgcaaaggagaagttagcgcctttcagttcgcctttatcgccaacctgaccgccggattccgcatagaatggcgtttgatccagcacgaccacagcttcctggcctgcattgatggcatcaaccgctttaccatcaacaaacagcgcagtcactttgccgttcagttccagatggtcatagcctttaaattcagatgcactgtcaacacggatcattgcgttgtaatcggcaccaaagccgctggcttcgcgcgcgcgacgacgctgctcttccattgcagcttcaaaaccagcttcgtcaactttgatgttgcgctcacgacaaacatcagccgtcaggtcaaccgggaagccataggtgtcgtacagacggaaagcagtttcaccatccagcgtatcaccagaaagttttgccagctcttcatccagcaacgccagaccgcgctccagagtacgagcaaactgctcttcttcagtcttcagcacctgctcaacctgcgcctgctggcgtttcaggtcttcacccgcagagcccataacgtcgatcagcggaccaaccagtttgtagaagaaggtttctttcgcgccgagcatattaccgtgacgcactgcgcgacgaatgatacgacgcagtacataaccacggttttcattggacggcattacgccatccgcgatcaggaacgcacaagaacgaatgtggtcagcgattacgcgcaggcttttattgctcagatcggttgcgccagtgactttcgctaccgcctggatcagcgtgcggaacaggtcgatgtcatagttagagttaacgtgttgcagcaccgcagcaatacgctccagacccataccggtatctacagacggcttcggcagcggttccatcgtgccatcggcctggcggttgaactgcatgaagacgatgttccagatctcaatgtagcggtcgccgtcttcttccgggcttcccggagggcccccccaaatgtggtcgccgtgatcgtagaagatttcggtgcacgggccgcacggaccagtgtcacccatctgccagaagttgtcagatgcgtatggcgcacctttgttatcgccgatgcgaataatacgttcgcgcgggatccctacttctttttcccagatttcgtaggcttcgtcgtcgctttcatagacggtaacccacagacgctctttcggcagggcaaaccatttttcgctggtcagcagttcccatgcaaactgaatggcatcgtgtttgaaatagtcgccgaagctgaagttgcccagcatttcgaagaaggtatggtgacgcgcggtgtaaccgacgttttccaggtcgttgtgtttaccacccgcacgcacgcagcgttgggaagtggtagcgcgggaataattacgcttgtcgagcccaaggaacacatccttgaactggttcatcccggcgttggtaaacaacaaagttgggtcgttatggggtaccagggagctgctggcaactacctgatgtcccttactatggaaaaagtcgagaaacgcctgacggatctcagcggtgctcttgctcataattatcctgaaatcaagctaacgaaatatcgccaccagctccagcgtgtcttaaccgccgggctggtaactgaaaagtgggaataagataagttttcttgactgggaagtaaaataccgtatgcgttcagtcggcaaaatttcgccaaatctcctggatatcttccatcagatagccacgatagagcagaaaacgctggatcttaactttttcactaaagacagttggcaaaggttcgccatattttcgcgtcgcctgatcgcgcgccagtgcgcaccagtcgatgtcacattcacgcatcgctttttctgtcgcttcgcgggaaatacctttctgattcagttcctggcgaatacgcgcaggtccataacctttgcggctacggctggcgataaagcgcgcaacaaatcggctgtcatcgagatagccatgttcatggcaccaggcaataacgcgctcgtaatcttctgccgtagcatcaatctcttctgggccatttttgcccataatcggtgccgcgagtttacgtcgcagttcttgctcactgtgatcgcgcaccgccagaatgcgtaccgcacgatccaacaggcgagcatatgccgggcgacgggatgtactttctgtcatggcatatccttacaacttaaaaaagcaaaagggccgcagatgcgacccttgtgtatcaaacaagacgattaaaaatcttcgttagtttctgctacgccttcgctatcatctacagagaaatccggcgtactgttcgggttgctcagcagcaactcacgtactttcttctcgatctctttcgcggtttccgggttatctttcagccaggcagtcgcattcgctttaccctgaccgatcttctcacctttgtagctgtaccacgcgcctgctttctcgatcagcttctcttttacgcccaggtcaaccagttcgccgtagaagttgataccttcgccgtagaggatctggaattcagcctgtttaaacggcgcagcgattttgttcttcaccactttcacgcgggtttcgctacccaccacgttttcgccctctttcaccgcgccgatacgacggatgtcgagacgaacagaggcgtagaatttcagcgcgttaccaccggtagtggtttccgggttaccgaacatcacaccaattttcatacggatctggttgatgaagatcagcagcgtgttggactgcttcaggttacccgccagcttacgcatcgcctggctcatcatacgtgccgcaaggcccatgtgagagtcgccgatttcgccttcgatttccgctttcggcgtcagtgccgccacggagtcaacgacgataacgtctactgcgccagaacgcgccagggcgtcacagatttccagtgcctgctcgccggtgtccggctgggagcacagcaggttgtcgatatcgacgcccagtttacgtgcgtagattgggtccagcgcgtgttcagcatcgataaacgcacaggttttaccttcacgctgcgctgcggcgatcacctgcagcgtcagcgtggttttaccggaagattccggtccgtagatttcgacgatacggcccatcggcagaccacctgccccaagcgcgatatccagactaaggctaccggtagagatggtttccacatccatggaacggtcttcacccaggcgcatgatggagcctttaccaaattgtttctcaatctggcccagtgctgccgccaacgctttctgtttgttttcgtcgatagccatttttactcctgtcatgccgggtaataccggatagtcaatatgttctgttgaagcaattatactgtatgctcatacagtatcaagtgttttgtagaaattgttgccacaaggtctgcaatgcatacgcagtagcctgacgacgcaccgcatcacggtcgccgctgaagcattcccgccgggtaatgccttcaccgcgggcagtggcaaaagcaaaccagacggtgccgacaggcttctcttcactgccgccatccggcccggcgataccactaatagacacggcataatcagcacgagccgctttcagtgcgcctatcgccatttccaccacgacgggttcactcaccgcgccatgctgcgccagcgtctcttcgcgtacgccgatcatctgcgctttggcttcgttactgtaggtgacaaatccgcgttcaaaccaggcggagctaccggcaatatcggtaatcactttcgctacccaaccaccggtacaagactcggcagttgttacggttgcgccacgggctttcagcgcctgcccaacctgttcacttaactgcatcagttcactgtcagtcatcacaacctctgtcagtcaaaaatttatgccggacaagatagcactttcgtcaggaagatggtgttggcgttgcaattttacgaggaggattcagaaaaaagctgattagccagagggaagctcacgcccccctcttgtaaatagttactgtactcgcgccagcgccacggcttgtcctaactgccagaccgccattgcgtaatgggtgctgtggttgtaacgggtgatggtgtagaagttcggcagaccgtaccagtactggtagccggtgccaacatccagacgcagcaggctggcttgttgatggttgcccagcggctgctgtggcgttaaacctgcggcggcaagctggctaatgctgtacttagttttgaagccatttggcaagcctggagcctgaccgtttgccattaccgcgacctgatcgcctttcacccagccgtgcgctttgaaatagttcgccacgctaccgatcgcatcaaccggatcccacaggttgatatgcccgtcgccgctgaaatctaccgcatattgtttgtaagagctcggcataaactgtccgtagcccatcgccccggcaaaggaacctttcagattgagcggatcgtcctgctcgtcgcgcgccatcaacaggaaggtttccagctcgccagagaaatactccgcgcggcgtgggtagttaaaactcagcgttgccagcgcatcgaggatgcgagttttccccatcacgcgcccccagcgggtttcaacgccgataatcccgacgataatttccggcggtactccatacacctgccacgcgcgattcaacgcatcttcatactgattccagaaaaccacaccgttctgcacgttgtccggcgtaataaattttttgcgataacggagccatgcgccgttcggaccacttggcggtttcacgcttgtggttggtgcctggttatccatcagccgcagtacgctatccagacgcttcgcctgggagagaatttcctgcaactgctgacgatcgaaaccgtgtttgttcaccattttgtcgatgaactgctgggcattcgggttattagcgaaatcgccgcccatctgcatcacattgtgctgcggctcaagcaggaagccgccagacggcgttccggtggtcgtatcagtctcagtaggttttggcttgctgctacaggcggcaagcaacacaaaaaggggaagcaatgttacataacgacgcttgaacatgaggggtccatttaacagattcaaccaggggcaagtatggtaaagcatcacgccccgcacaaggaagcggtagtcactgcccgatacggactttacataactcaactcattcccctcgctatccttttattcaaactttcaaattaaaatatttatctttcattttgcgatcaaaataacacttttaaatctttcaatctgattagattaggttgccgtttggtaataaaacaataaatcctgaaggagagaacaatgatagaaaccattactcatggtgcagagtggtttatcgggctgttccaaaagggcggagaggtgtttaccgggatggtgaccggcattcttccgctgttgattagcctgctggttatcatgaacgcactgattaattttatcggtcagcatcgtattgaacgttttgctcaacgttgcgccggtaaccctgtttcccgttacctactgttaccgtgcattggcacgtttgtcttttgcaatccgatgaccctaagcctgggtcgctttatgccggaaaagtacaaacccagctactacgcggcggcctcttatagctgccacagtatgaatggcctcttcccccatatcaaccctggcgaactgtttgtttatcttggcattgccagcggtctgacaacgctgaacctgccacttggcccactggcggtgagttatctgctggttggtctggtcaccaatttcttccgcggctgggtgaccgatctgaccaccgccatttttgagaaaaagatgggcattcaacttgaacaaaaagttcacctggcaggagcaacaagttgaaataacacctggcaggagcaacatcatgacgcatattcggatcgaaaaaggaacgggtggctggggcggcccgcttgagctgaaagccacgccgggaaaaaaaatcgtctatatcaccgccggtacccggcctgcgattgttgacaaactggcacagcttactggctggcaggctattgacggatttaaagaaggtgaacccgcggaggcggaaattggtgtcgcggtaatcgactgtggcggcacattacgctgcggcatctatccgaaacgacgtattcccaccattaatatccacagcacgggcaagtccggtccgctggcgcagtacattgtggaagatatttatgtctctggcgtaaaagaagaaaacatcactgtagtaggtgatgcgacaccacaaccctcttccgtgggccgtgactatgacaccagtaagaaaatcaccgaacaaagcgatggtttactggcgaaggtgggaatgggcatggggtccaccgttgcggtgctgtttcaatctggtcgtgacaccatcgacactgtattaaaaaccattctgccgtttatggcattcgtcagcgcgctcattggcatcattatggcttctggccttggtgactggattgcccacggtcttgctccgctggcgagccatccactgggtctggtcatgctggcgctcatctgttccttcccactgcttagtcctttcctcggcccaggcgcagttatcgcacaggttatcggcgtattgattggcgtgcagattggtctcggcaatattccgccgcatctggctttaccggcactgtttgccatcaacgcgcaggcggcctgcgacttcatcccggtcggtttgagcctggcggaagcccgtcaggacacggttcgcgtcggtgtcccttctgtactggtgagccgctttttaaccggcgcgccgactgtactgatcgcctggtttgtctccggttttatctatcaataaaggctgaaacatgaccgttatttatcagaccaccatcacccgtatcggcgcgagtgccattgacgccctcagtgaccagatgctcatcacctttcgtgaaggcgcgcctgcggacctcgaagagtattgcttcattcattgccacggcgagttgaaaggtgcactccatcccggtttgcaatttagtctcgggcagcatcgctatccggtgaccgctgttggcagcgtggcggaagacaaccttcgcgaactgggtcatgtcaccctgcgcttcgatggtttaaacgaagcggaatttccgggcactgtccatgtggcaggccctgtccccgacgatatcgcgccgggaagcgttttgaagtttgaatctgttaaggagtaaaaaatgaatcaggttgccgttgtcatcggtggtgggcaaaccttaggcgcgttcctgtgccacggtctggctgccgaggggtatcgcgtcgcggttgtcgatattcagagcgacaaagccgcaaatgtggcacaagaaattaacgccgaatatggtgaaagtatggcgtacggttttggtgctgacgccactagcgagcaaagcgttctggcgctctctcgtggggtagatgaaatctttggtcgcgtggatttgctggtctacagcgccggaatagcaaaagcagcctttatcagcgacttccagctcggcgattttgaccgtagcctacaggtgaatctggtgggttatttcctgtgtgcgcgtgaatttagccgtttgatgatccgcgacgggattcaggggcgcattattcagatcaacagcaaatccggcaaagtgggcagcaaacacaactctggctacagcgcagcgaaatttggtggcgtcgggctgactcaaagtctggcgctggatctggcggagtacggcattacggtgcatagtctgatgctcggtaacctgctgaaaagcccgatgttccagagtctgttgccacaatacgcgaccaagctgggtatcaaaccggatcaagtcgagcagtattacatcgacaaagtaccgctcaaacgcggctgcgattatcaagatgtgctgaatatgctgctgttctacgccagtcctaaggcgagctactgcaccggacagagcatcaatgtcaccggcggtcaggtgatgttctgatcaacagcggagatccattaaggatctccgtgagactatagaatgcctgatgcgctacgctcatcaggcatacaggacttccgccactacattaaggaaaagttatggtatccgcactcatcaccgtcgccgttatcgcctggtgtgcgcaactggccttaggcggctggcaaatttctcgttttaaccgtgccttcgacacactatgccagcaagggcgggttggcgtgggccgttccagcgggcgctttaaaccgcgggtcgtggtcgccatcgcgctggacgatcagcagcgcatcgtcgacaccttgtttatgaaaggactgaccgtcttcgcccgaccgcaaaaaattcccgcaattaccggtatgcatgcgggtgatttacagcccgatgtgatctttccccatgatccactaagtcagaatgctctaagtttggcgcttaaactgaaacgtggataatttcgttgtgaatgttacttgcttgcgaagttatcattttgaaacctaaatcaggtaatcacgcccatgaaacctcgtcagcgtcaggccgccattctggagtatctgcaaaagcagggtaaatgcagcgttgaagaattggcgcaatactttgacaccacaggcacaaccattcgcaaagatctggtcattctggaacatgccggaaccgtcattcgtacttatggcggagtggtgttgaataaagaggaatccgatccgcctatcgatcataaaacactcatcaacacccacaagaaagagctgattgcagaagctgccgttagttttatccatgatggcgatagcatcattcttgatgctggcagtaccgttttgcagatggttcccctgctcagccgctttaataacatcacggtgatgaccaacagcctgcatatcgtcaatgcgctatccgaactggataacgaacaaactatcctgatgccaggcggaacgtttcgcaaaaaaagcgccagttttcacgggcaactggcagagaatgccttcgagcatttcaccttcgataaattgtttatgggcaccgacggcatcgatctcaatgcgggcgtaaccacctttaacgaggtttataccgtcagtaaggcaatgtgcaatgccgcgcgcgaagtgattttgatggcggacagtagtaagtttggccgtaaaagccccaacgtagtttgcagtcttgaaagcgtcgataagctgattaccgacgcaggtatcgatccggcgtttcgtcaggcgctggaagagaaagggatcgatgtgatcataaccggagagagcaatgagtgaagcactactgaacgcgggacgtcagacgttaatgctggagttgcaggaagcaagccgtttaccggaacgtctgggcgatgattttgttcgcgccgccaatatcatcctgcactgtgaaggcaaagtggtggttagcggaattggcaaaagcggccacattggtaagaaaatcgccgcaacgcttgccagtaccggcactccggctttttttgtccatccggcagaagcgctgcacggcgatctggggatgatcgaaagccgcgatgtgatgctgtttatctcttactccggtggcgcgaaggaactggatctgattattccgcgtctggaagataaatctatcgcgctgctggcgatgaccggcaaaccgacgagtccgctgggcctggcggcaaaagcggtgctggatatctccgtagaacgcgaagcctgcccgatgcaccttgcgccgacctccagcaccgtcaataccctgatgatgggtgacgcgctggcgatggcggtcatgcaggcgcgcggatttaatgaagaagattttgcccgctcccacccagccggggcactgggcgctcgcttgctgaataaagtgcatcatctgatgcgccgtgacgatgccatcccacaggtggcgttaaccgccagcgtgatggatgcgatgctggaactcagccgcaccggtctggggctggtggcggtatgtgacgctcaacaacaggtacaaggcgtctttaccgacggcgatttacgtcgctggctggttggcggcggcgcactcaccacgccagtcaatgaagcgatgacggtcggcggcaccacgttgcaaagccaaagtcgcgccatcgacgccaaagagatcctgatgaagcgcaaaatcactgccgcaccggtggtggatgaaaacggcaaactcaccggcgcaataaacctgcaggatttctatcaggccgggattatttaatccttcaatcccagacgtttcgccagccgatgcaggttggcgacgtcggtttccagcatccgcgcgcaggcagcccagttgtgatgattttgtgccagtgcctgacgaatagtttcacgctggaacgcttctgtcgcttcacgcaggttttgcttaacaacgggcaccgccgccacttctggcgtcggcaacgtcacctcaggaaaagcaaaatgttgcgcctcaagaatcacttcatcgccgctgcgggtggctctcgccagaactaccgcccgatgaatagcatgttccagttcgcgcacgtttcccggaaaactgtagtgttgcagtaaatttcgcgctccggcacttaataccacgcgggagagcccctgccgcaaacgacactgctcgcagaaataccccgccagcagaatgacatcatcgccccgctcacgcagcggcggcacgctaagtggaaacacgctcaggcgatgaaacaaatcggcgcggaatcgccctgccagcacctcttcgcgtaaatcgcggttagtcgccgccagcacgcgcacatcgacccgcaaacaacggtcatcgccaacgcgctgaatatcgccatactgcaacaccctcagcagcttggcctgcaatgccaagctcaactcgccgatctcatccagaaacagcgtgccgttatccgccatttcaaacttcccgctgcgattactgatagcgccagtaaacgctcctttcacatgcccgaacaactcactttccgccacactttccggcagtgcagcacagttgagatagaccagcggattcaccgcccgtgggctggcttcatgaatcgctttcgccaccagctccttaccggttccagtctcaccgctgatcaggacgttgagatcggacgccgccacaatctcaatctcttttttcagttgcgtcatgccaggggacaagccaatcatctgcgtctgtttcaccgcttcaaacggcgtggcatcgcctggcagcatattctggctttccagttgttcaatcagcaacgcattgcttaacgctcccgccgccagcgcagcaatcagccgtagctcttcgtcgctgaaaacatcgaactgatcgggctgcatcccgtcgagcgtcagtgcgccgatcaggttttgcccggcaaacaatggcagaccaacgcaggcgtgaaccttcagactctcctgcccaggaatcaaaccgtcatagggatcgggcaattcgctgtctgcgggaaagcgcaccacatccccggcgcgggcaatcgcttccagccgtggatgcccttccagcgcaaagcgtctaccgagtacatcctttgccagaccgtcgatggcaagcggaataaactgccggctatcgtaacgtagcaacgcagacgcatcgcactccagcacctgacgtagcgtggtgatcaggcgctgaaaacgatcctggtgaccaatcccacgctgcaattcgatggcgatattcgccagcacatcaacggaaaaactcatctttgcctcactgtcaatttgactatagatattgtcatatcgaccatttgattgatagtcattttgactactcattaatgggcataattttatttatagagtaaaaacaatcagataaaaaactggcacgcaatctgcaattagcaagacatctttttagaacacgctgaataaattgaggttgctatgtctattgtggtgaaaaataacattcattgggttggtcaacgtgactgggaagtgcgtgattttcacggcacggaatataaaacgctgcgcggcagcagctacaatagctacctcatccgcgaagaaaaaaacgtgctgatcgacaccgtcgaccataaattcagccgcgaatttgtgcagaacctgcgtaatgaaatcgatctggcggatatcgattacatcgtgattaaccatgcagaagaggaccacgctggggcgctgaccgaactgatggcacaaattcccgatacgccgatctactgtacagccaacgctatcgacagcataaatggtcatcaccatcatccggagtggaattttaatgtggtgaaaactggcgacacgctggatatcggcaacggcaaacagctcatttttgtcgaaacaccaatgctgcactggccggacagcatgatgacttacctgacaggcgacgcggtgctgttcagtaacgatgctttcggtcaacactactgcgacgagcatctgttcaacgatgaagtggatcagacggagcttttcgagcagtgccagcgttactacgccaatatcctgacgccgttcagccgcctggtaacaccgaaaattaccgagatcctgggctttaacttaccagtcgatatgatagccacttcccacggcgtggtatggcgcgataacccgacgcaaattgtcgagctgtacctgaaatgggcggctgattatcaggaagacagaatcaccattttctacgacaccatgagcaataacacccgcatgatggctgacgctatcgcccaggggattgcggaaaccgacccacgcgtggcggtgaaaattttcaacgtcgcccgaagcgataaaaacgaaatcctgactaatgtcttccgcagtaaaggcgtgctggtcggcactagcacgatgaataacgtgatgatgccgaaaatcgccgggctggtggaggagatgactggtttacgcttccgtaacaaacgcgccagtgctttcggctctcacggctggagcggcggtgcggtggatcgtctttccacgcgcctgcaggatgcgggtttcgaaatgagccttagcctgaaagcgaaatggcgaccagaccaggacgctctgaagttatgccgtgaacacggtcgcgaaatcgcccgtcagtgggcgctcgcgccgctgccgcagagcacggtgaatacggtagttaaagaagaaacctctgccaccacgacggctgacctcggcccacggatgcagtgcagcgtctgccagtggatttacgatccggcaaaaggcgagccaatgcaggacgttgcgccaggaacgccgtggagtgaagtcccggataacttcctctgcccggaatgctccctcggcaaagacgtctttgaagaactggcaagcgaggcaaaatgagtaacggcattgtgatcatcggtagcggcttcgccgcccgccaactggtgaaaaatattcgcaaacaggacgccactattccattaaccctgattgccgccgacagcatggatgagtacaacaaacctgacctcagccatgttatcagtcaggggcaacgtgccgatgaccttacccgccagacggcgggtgaatttgccgagcagtttaatctgcacctgtttccacaaacctgggtgacggatatcgatgccgaagcccgtgtggtgaaaagccagaataatcagtggcaatacgacaagctagtactggcaaccggtgccagtgcctttgtcccgcctgtgcctgggcgtgagttaatgctgacgttaaatagtcagcaagagtatcgcgcctgtgaaacgcaactgcgggatgcccgacgcgtgttgattgttggcggtggtttgattggtagcgaactggcgatggatttttgtcgtgcaggcaaagcggtcacgctaatcgacaacgctgccagtattctggcgagcttaatgccaccggaagtaagcagccgcttgcagcatcggttgacggagatgggcgttcatctgctgttgaaatctcagttacaggggctggaaaaaacggattctggcattcaggcaacgctggaccgccagcgcaatatcgaagtggatgcggtaattgccgccaccggactgcgcccggaaaccgccctggcacgacgcgccgggctgacgattaatcgcggcgtttgcgtcgatagttatctgcaaaccagtaataccgatatttacgcgctgggcgattgcgcggaaattaacggtcaggtattgccgttcctccagccgattcaacttagcgcgatggtgctggcaaaaaatcttctcggcaataacacgccgctgaaactcccggcgatgctggtgaaaatcaaaacgccggaattaccgctgcatctggcaggcgaaacccagcgtcaggatttacgctggcaaattaataccgaacgccagggaatggtggcgcgcggcgttgacgatgctgaccagcttcgcgcctttgtggtcagtgaggatcggatgaaagaggcatttggattgttgaaaacattgccgatgtaagtgggctactgtgcctaaaatgtcggatgcgacgctggcgcgtcttatccgacctacggggacgcatgtgtaggccggataaggcgtttacgccgcatccggcaatggtgtccaaatgcaacacgttttatccgttctggacttcacccgctaaccaacgcgccgcagcaataaccccctgccccagagacaaaccgccatcacccgccggtaaactctgtggaaagagcaatgtgaaatcagcgagataatgcgccagacgtgcacgcagcaaacggttatgaataaccccgccgctaaataccagcgtagtgataccacgcatcgtggcctgctcacgcatcaacgcggcaaaaccctgcgccagcgcatcatgaaacgcccacgcgcgttgattaaccggtgcctgccagttcagccactgctgccagaaagtggcgagatccagttgattgtccacccgcggcattgtcaccggatgcgtcactccgtggcaactggctgcgagcgcctccagagcacaagccgcttcaccttcataacttaacgtggctggcgcacagcccagtgccgccgccactgcatcgaaaaaacgcccacagctactcgccagcggcgcgttaattccacgctcaatggcccgcgccagcacgctccagttttgctgttgcacacttgctgtttcagagtaattctgccactccggcacaaagcgcaggcactgcgccagcaggtttcgccacggctgcttcgctgccaaatcgccacccggaagcgccactgcaggcaagccgcccaggtgctcacattcgcgatagttcacccgcaggcactcgccgccccacaaagcgccgttctcccccataccgataccgtcgagcgtcaaagcaatgacatcaccgccatccagcggccactgatgctctgccagacacgccgctgcatgggcatgatgatgcagtaccgtttgcgtcggcagattcatttcacgcgcccactggctggagacatagcccggatgcgcgtcatgcacaacgtattgcggggtaaaatcgtagatgttttgcatcaggcgtaacgcttcgcgccactgcatctggatgccatcgtcacttaaatcgcccagatgctgactcaacaccgcttgttcaccgcgcaccaggcagaaggtatttttcagatccgcgccgagacacagcacaggcggaacatttttaaagcccggaggcaaagccagcgcatccggcacatacccccggctacggcgcagcatttcgccgctttcgcgcaccacgctatcatccatccgctgcacgatgtcgcggttatgtatcaagaatccgtcggcaatgccctgcaaatccgccagcgcctgttcgttgctgatagctggtggtttaccgctcaggttgccggaggtcatcaccagcgggcattgcagttcctgtaacagcaaatgctggagcgggttcgcaggcaacattaccccgacttcgttaaggtcaggggcgatatcatcacaaagctcaggaacgtattttttatccaccagcacaatcggcgcggcgggcgtggtaagcaactggcgcgcagcgtctggtaaaccgtcagccactggcaacatgaccgccagcggtttcgccgggcgatgtttgcgcgcccgaagtgtcgccaccgcgttactgttacgtgcatcgcaggcaagatgaaatccgccaatccctttgatggcgacaattttgcccatttttaactgtgcgatagctgcctgtaatgccgcctcttgttccgcatgttcaccatgacttacccattcaagatgcgggccacactccgggcaggccaccggctgggcgtggaagcgacgatcgagcgggtcacggtactctttgtcacaggccggacatagcggaaacgccgccatcacggtaaacgggcggtcgtaaggcatggcgcgaataatggtgaaacgcgggccgcagtgggtacagttgataaacggataacgataacgccgttcgcctggggtattcatttcggcaaggcaagcagggcaagtagcggcatcgggaacaatttgcgtattcatggtgccgcctgtgctctggcgtatagtgaactcggtgggcagttgactccagataaacggctcacgctcgacgctatcaatacgcgccagcggcgggcagtgctgatacaattgaacaagaaacgtttccgggtcttcccgcagccggacttctacgccatcgccgtcattacagacatcgccgtgaagatttaattgctgtgccagctgccagacaaacggacgaaaaccgacgccctgcactttgccacgaatacgcagttggacaccgcaagatgtgttttttgccattgagttattcccgccatcatgaattgcgtaacccgccctgccggacacgacagcgtcgcatccggcagtcacaggtcggcgataccgcccgctccgtattctacgaatatttccgggaattcctttgatgccagaacagttctgtaagatttttagaacatcagcgccgtacggcggcgtttttctgcgctcagttgttcaagtttattacgatcgacacaaatcagcgcatgagtcgggcaagccgccatacacgccgggccgtcttcacgatggttgcacaggtcgcatttattggcttcggctttgtcagcccgtacattcagacccgcgccgctgttgcggatcaccggacgtaccaccacttccatcgcaccatacgggcaagccacaacgcaggttttgcaaccaatgcaacgttcctgcatcacatgaacaaaccctttatcacggctgatagcaccattcgggcagacgttagcgcacggtgcatcttcacactgacggcaaactgtcgccgtggaaatgttcacacctttaatgacatggatacgcggtaaaaaagtttccggggtcaggcttgcacagtcctgattttcctgatgagaaaccacgcacgctacttcacaggtacggcaaccaatacatttactcgcgtcagcaatgatgaaacggttcatcaaattctccagcaatgacagttaatgcgccgatacattcacaaatcatgccagtttttaatttactgttatttaaggaaattaatttctgtaatgcaggaaaaacgatgtcatcgacactagtgacgatgacatgtgatgacaatgtttatcggctaggagcaatgagactgtcgcggcggatcagttttccgctgaaggttttcggcggactgaaatccccgccatcgagcataaaaatcagccgtccaataatttcctgaatcatctcagtcaccggaatttttacgctggagagcgccggaacggtgtagggggcaatagcgatatcatcgaatccgataacactcacctgctctggcaccgctacgccgcgctcgtgtaacgctttcatcgcacctatcgccatatcgtcgttactggcaactaacgcgctaaatttagccccacgttcgagcaacatttctaccccttcggccccgctggcaggcgtccatttaccgttagcgataagtttttcattgagcgcaataccatgctgcgccagcgcgtctttatacccggcaagacgttcaatgctggtgggggaatccatgctgccggtaaggaaagcaatctcctgatgcccggcgtttatcaactctgccacggcgttaaaactggtctgtttatgatcgcaccagacgctatggctgctgtttttgcgcaggcggcgattaagcaccattatcggctgactgtgcgcgtcaatgatgtcatcgatctcatccacgcttaaaaaacgcgggtaaatcatgatcgcgtcgcagcgcagatccagcagatactgaatcgcctggcgctcttcttctgcgctgtgtttaccatctgccaatagcaactgccgccctttctcttccgccattcgcgcggcatgaaagagtaattcactaaaataaatgccgtggtaaagcgtgttggtcactaccagccccagcgtctgagtactcttcgcgctcagattgcgcgccagcaagtttggacggtaaccgctctcttctaccgcctgaaacacgcgatctttagtctcctggctgacgtagccattaccactaagcacgcgggaaacggtcgctttactaaccccggcgcgcttcgccacttccagcatcgtcgtcatcattttcatccctttacacgcaatcaacgcagtgtactgcaccgtttgccgattgtccttgcacaatcggcgggaaaaatattcaggtgaccggtttcacaaatataaaaaatgaacaattcactctcttgcttatttagtgacaactattcatgattttgtgaaaccggtttcttaattccgtttcagcatcggcatttttccgtcacgtcgactgataacaactacatctaccctactgataacaggataaaatccgatggccaaaaattatgcggcgctggcacgcagcgtgatagcggcactgggcggcgttgataacatcagcgcggtcacgcactgtatgacgcggttgcgctttgttatcaaagatgatgcacttatcgacagcccgacgttaaaaaccatccccggcgtgctcggcgtggtacgtagtgacaaccagtgtcaggtgattatcggcaataccgttagtcaagcctttcaggaagtcgtcagcctgctgccgggagatatgcagcccgcacagcccgtgggtaaacccaaactcacgctacgtcgcattggtgcggggatcctcgatgcgctgatcggcaccatgagtccgctgatcccggcgattatcggcggaagcatggtcaaactgctggcaatgatcctcgagatgagcggcgtgctgacaaaaggaagcccgaccttaaccattctgaatgtgattggtgacggtgctttcttcttcctgccgctgatggtcgcggcatctgccgccatcaaatttaaaaccaatatgagcctggcgattgccatcgcgggtgtgctggtacatccgagttttattgaactgatggcgaaagcggcccagggtgaacatgtcgaatttgccctgattccggtcaccgcggtgaaatacacctacacggtgatcccggcgctggtgatgacctggtgcctgagttatatcgaacgctgggtggacagcattacaccggcggtgaccaaaaacttcctcaaaccaatgctgattgtgttgattgccgcaccgctggcaatcctgctgattggcccgattggtatctggatcggtagcgccattagcgcgctggtttacaccattcatggttatctgggctggcttagtgtcgccattatgggcgcgctgtggcctctgctggtaatgaccgggatgcaccgcgtctttacgccaaccatcattcagaccattgccgaaaccggcaaagaagggatggtcatgccgagtgagatcggcgctaacctgagcctgggcggtagtagtctggcagtggcgtggaaaacgaaaaacccggaactgcgtcagacggcgctggctgcggcggcaagtgccattatggcggggatttccgaaccggcgttatatggcgtggcgatccgcctgaaacgtccgcttatcgccagtcttatcagcggttttatttgcggcgcggttgccggtatggcggggcttgccagccacagtatggcagcgccggggctatttaccagcgtgcagttcttcgatccggcgaatccaatgagcatcgtctgggtgttcgcggtcatggcgctggcggtggtgctgagctttatcctcacactgttgctcggctttgaggatattcctgttgaggaagcggctgcccaggcgcgaaagtatcagagcgtacaaccgaccgtcgccaaagaagtaagtcttaattgaggatgaaaatgagtgtatttccagaaagttttttatggggcggcgcgcttgccgccaaccagtctgaaggtgcgttccgtgaaggtgacaaaggtctgaccactgtcgatatgatcccacacggcgagcatcgaatggcggtgaaactggggctggaaaaacgttttcagttgcgagatgacgagttttatcccagccatgaggcgacggatttttatcatcgttataaagaagatatcgccctgatggcagagatgggattcaaggttttccgtaccagtattgcctggagccgtctctttccgcagggcgatgaaatcacgcccaatcagcagggcattgctttttatcgttctgtctttgaagagtgtaaaaagtacggtatcgaaccgctggtcacgttgtgccacttcgatgtgccgatgcatctggtcaccgaatatggctcctggcgtaaccgcaagctggtggagtttttcagccgctacgccagaacctgctttgaagcatttgatggtctggtgaaatactggctaaccttcaatgaaatcaacattatgttgcatagcccgttctccggcgcgggtctggtgtttgaagaaggtgaaaatcaggatcaggtgaaatatcaggccgcgcatcaccagctggttgccagtgcgctagccaccaaaatcgcccatgaggttaacccgcaaaatcaggtgggctgtatgctggcgggcggtaacttctacccttacagttgcaagccggaagatgtctgggcggcgctggagaaagaccgggaaaacctgttttttatcgatgtgcaggcgcggggcacgtatccggcttactctgcccgcgtattccgcgaaaaaggggtaaccatcaacaaagcaccgggcgatgatgaaatcctgaaaaacaccgtcgattttgtctctttcagctattacgccagccgctgcgccagcgcggagatgaacgccaacaacagcagtgcggcgaacgtggtgaaaagcctgcgtaatccgtatctacaggtgagcgactggggctggggaattgatccactcggtctgcgtatcaccatgaatatgatgtacgatcgttatcagaagccgctgtttctggtggaaaacggcctgggcgcaaaagatgaatttgctgccaatggcgagattaacgacgactatcgcatcagctacttacgcgaacatatccgcgcaatgggcgaagcgattgcagacggcattccgctgatgggctacaccacatggggctgtattgatttagtttccgcctctacgggtgaaatgagcaaacgctacggctttgtctttgttgaccgtgacgacgcaggcaacggtacgctgacgcgcacgcgtaagaaaagtttctggtggtataaaaaagtgattgccagtaatggggaagatttagagtaagtaacagtgccggatgcggcgtgaacgccttatccggcctacatgtcgcacgaaccatgaaggcccgataagcgcagcgcatcgggcaatttagcatttggcatcagagctggttcaccccatcaagaacatccctgtcctgattccttaatgaaaaattactcttcttccaccgctaactgcgcgaagccgccatttccttcccagccttccagtcgttgataaacggtttctaccgcatctttaatcggctgggtcatcgggtagtaaaagccgacgatatccggctgaatgccgaggaaaatcacttcgccaatatcttctttcaactggtcgataaggtaattcaacggcatgttatgggtagtcatcataaacatctcggcgatatcatccgggtcgatgatgcggatctcgccggggtttagccccatatccgtggcgtcgacaatcagcagtcgtgtcgggcgcagttcacggatagcgacgatgtcgttttccggtgcgctaccgccgtcaatcaccacccagttacctttcggcgcggcggcgcacttttccgccagcagcggacctgcgccatcatcgcccatcatgctattgccaacacagagtaaaacgtcagtcacgcagtctcctcaccatcaaatagatggcgttttcctgatgaatatcatgcagcatacttaacagcattgtactccattcctgctgctggctagtttgcgctgcccgggctttatcgaatgcgttggccagcatcggcacatggttaatgtcgatgacgatctcaccatatttcggcacgccttccattttgcggcgggcttcactgcctgcctccagagtggcaatccatgccagatattcatcccacgggcaggtgagcgccgcttccaggcaatcgataaccccaaggtggtgaccaatcgccaggctgtaatagaccacctgctgcgcctcggcgggcgtggcatcgttctcatcaataaatttatggctcagttgactgaacaccaccttttcactcatcggatacgcgcctcttcaacaacatgattcagatggctgacaatctcgttcagacgcggatcgttttccgcttccagccagcgtgcaacctgttcttcgccctgccctaactgtgtaaggtaatcatcggcaatctgacgaccgtaacgataacccgccaggcgacgtgcttcgcgatccactttcacgcgcagcggctgcaccatatcaccatgcaggatctccgccggttgttcatccagttcacccggcccacgggcgtgaattttctgctccagcaggccgagcgccattgcaaagccgtacagcgtggcggcaggcgttggcgggcagccagggatataaacatccacagggacaattttatccgtaccgccccacacgcagtagagatcgtggaagatcccgccactgttaccgcaggcaccgtaggagatacaaattttcgggtccggcgcggactgccacgcacgcagcgcaggggatcgcattgcacgggtgaccgcgccggtaaacagtaaaatatccgcatgacgcggactaggaacgactttaatgccgaagcgttctgcatcaaacagcgggctaagcgtggcgaaaatttcgatttcgcaaccgttgcagccgccgcagtccacgcggtaaacataggcagaacgtttgatttttttcagtaagctcgccttcatgctggcgatggattcatccaccgtcatggggaccggaatgccgttggcgtcacgggggcctaataaattgctcatcagatggcctctttcatatggcgagtcagttcaatacggtcggacggcaccaggcatttctggcgcttacattccgggcaagtctcaaagctttcgcggtggttttccgcgcggctgtcgccgttgtgcttaagcagcgcaatggcgtagtcgatctctttctggacggcgaaaggacgattgcagacgcggcagttgcacagcgcgaagcgggactgttgcaggaagtcttctttcttccacaccgccagttcgtactcttggctcagtttgatcgccgccgtcgggcagacttcttcgcagcgtccacagaagatgcagtgcccaagattaaactcccaggcaagctctcctgtggcgaggtcagtttcaaccgttaaggcgttactcgggcaggcattgacgcaggccgcgcagccgatgcactgctgcgggttctgctctggcttaccacggaagtttttatcaaccgcaatcggctccagcggataagagctggtcgccgtgccggttttgatgacttttttgataaaggtaaacatggcgattccttatttcagcgggctgtttttacgctcaatgctgtaacgctcgagttctttgtacggcaccactttgctcttcttcttacgcacatcgaccacggtcatgcggtcggtacaggagtagcaagggtcgaggctaccgataatcagcggcgcatcggaaacggtgttgccgcgcagcatgtagcgcagggtcggccagttcgcgtaggtcgcggcacggcagcgccagcggtacagcttctggttgtcgccggtcatgctccagtggatatcatcgccgcgcggcgcttcggcaaagcccagcgcaaagcggtgcggaatgtaggtaaagccttccaccatcagtgggccacccggcaggttatccagaccgtagtcgatcatgttcagcgcggtatagacttcgttgatacgcactttcagacgggaaataacgtcgcagccctgctcgctgtggacttccattggcagcaggccatagccgacaaacgggtgatcggcgcgggtatcacgggcgtgaccgctggcacggaccatcgggccgacgttactgaagtcgcgagcgatttccgggtccagacgaccaatgccgacagtgcgctgttccatgttcggagtgctcagcagcacatccaccagctcctgcacttcacgacgcatctgttgtgccagctggcgggtctggatcatgtcgtctttcagcagatcgcgacgaatcccgccgatcaagttcaggccgtaggttttacgcgcaccggtaaggatctctgccattttcatggaggtttcacgcacgcggaagaactgcataaagccggagtcgaagccggtaaagtgacaggccaggccaaggttgagcagatggctgtgcaagcgttctacctccagcagaatggcgcggatcatctgcgcacgttctggcacctgaatacccatcgcgttttccacgctcgtggtgtaggcggtgctgtgggcaaagccgcagatcccgcacacacggtcagagaggaaggtcacttcgttataacccatacgggtttccgccagtttttccatgccgcgatggacgtagaacagacggtagtcggcgtcgataatgttttcgccatcgacgaacagacggaagtggcccggttcatcagaagtgacgtgcagcggaccaatcggcacgacgttgtttttcttgtcgcccagttcgttgatgaactcgtaggtttcagcatcggtggtcggtgccggacgctgacgataatccatgctgtctttacgcagcggataaagttcatccggccagtcatccggcagcaccagacgacgttcatccggcagaccaaccggaatcaaaccgtacatatcgcgcacttcacgctcgccccacaccgccgccggaacgcgcggcgtcacggacggatattccggtttgttggcgtcaacttcgacgcgaaccgtaatccaacacttagtgcccttctccatgctcagcacgtagtaaacggcgtaatgaccattcagtttgcgttcgtcgttaccaaacagcacgctcagccagccaccctgtttgtagtaaagaaactccaccacttccggcaggtagttcacctttacggtgacagtcagctgatctttggtctgccaggcgtggtccagcacgacgcccggaaatgcctcattcagcgcggcgagataatgttgacctaatttttcttcagacatgctcaaactctctttaatcacgccgccagcaaggagacgaacgctaaaaatgcaaagccaaacccagcccaggtaatgcgcggagtaatatcaagacgcagacgggccatgctgttttcgaacagcgcgataaccaggacgccgaccaccagttttacgatggcaatcaccagcgccagcagcagtccaccggcggtgaaggtttccatttgtccccacggaataaacaccccgacgaacatctgcaacaccaccagctgtttcaggctgataccccatttcatgacgccaaagccgctgccgctgtattcagagagcgggccttcctgcagctcctgctcggcttccgccaggtcgaacggcagtttgcccatttcgataaaggtggcgaacgcacaggcacaaagcgccagtaccagcgggatgctctggctcagcggccagtgataaacggtgtcggtgatgttgctgatgttggtggaaccggcaacctgtgcggcaacccacagaccaagcagcagcatcggttcgaccagcacgccaagcatcgcttcacggctcgcgccgatagcggtaaacgggctaccggtatccagaccagaaatggcaaagaagaaacgcgcgatggcaaagagatacagtaaggtgatcaaatcacccagttgcggcagcggagaaccgacggtcaccaccggcagcgcagtagcgatagtcagcatgacgcccaccatcacatacggcgtcaggcggaacacccagccggaggcatccgggccgacgctctgacgccccagcagtttgataatgtcgcgatactcctgcaacacgcccggcccgcgacggttatgcaagcgggcgcgcgccacgcgggttataccggagagcagcggcgcaacggcaaataacaccagcgcctgaattaacggatataaaacactcattctcaggctcctcgactaacaataatcaccaccagtaccgccagttcaaccagcgccatccggcggaacagcaacgcactcccctcgcactgccagcccggcaccagagacaccggattcagccatttgcgtagtttcagcaccggcgcaaacgcctgtttcaccggcatggcaaaaccgtgagcggtaatcaccatacttttttcgtggtcgtaaccgcacacccaggccgcaccgcgggaacggcttggcaaacgatcgcctttgcaaatcgccataatgatgaatggcagcagcgggcaggcaatcagcagcaacgtgatcatcggttgagaaacggtggtgttagcaggctccagcggcagaggtacagcagcagagagcatcggcagtagccacggcgcagcaacaccgccaattacgcagcaaatcgccagtgccactacgcttacgctcatcaggagcggcgcacaggtggcgttttcggcttctttggtgcgcggcgcgccgaggaacgtgacgccatagactttcgccatacacatcaccgccagcgcaccggtaattgccagccccacagcgagcagcggccccagcagacgggcaacaaacgcgccactattgctcagtttgaaaaaactttgatagataacccattccccggcaaaaccattcagcggcggcagcgcagccattgccatcagcccgactaacatggcgatggagataaccggcattttcttgccaataccaccgagtttttcgatatcgcgatgaccggtacggaaccagacgctccccgccccgaggaacagtacgcttttgaacaggctatggttaagcagatggtacagaccaccgaccaggccaagagcaatcagcgccggttgttcgagcgcgatacccgttacgccagcgcccagccccagcaggatgatgccgatattttccagggtgtggtaagccagcaggcgctggatgttgtgctccaccagcgcatacagaccaccgacaaacgcggtgatcatgccgagcaccagcagcgcgatcccccaccacagcggtgcattaccgcccagcagactcagggttaaaatgcccagcaggccaattttcatgactaccgtagaaaacaacgcggcagctggcgcagaggcgttcgcatgtgcctgcggcacccagccgtgcagcggaataatcccggccagcaggccaaagccaatcactccgagcagccagatatcggaaccgagcggcagctgttgcatacgcatatccagcaggcgcagatccagcgtgccgtaacgctgccacagcagccagcaagcaatcgccagcagcagagtgccaagacgccccagcgcaaaccacagtttgccctctttgctgttgctggtgaggaacaccgcgcacagggccatgatttcggccattaccacgaacatgccgaggttgctggcaatgacggcgcagacggcggcagccatcaacatattgatctgcaagccgttgcacttcacctgcgcgtggcgatgccagtcaatgttgtagaggctgacaaacagaccgcacagaccgagcgtaatcagccaaatcgcgttaagcggagagatttgcacatcgtagcttaccaggctcagcgcaccgctcacgccaaccgcgccagtcagtacagtgaagcccgcggctgccgtatacagactaccaaccgcgccgccaattccagctatccagccacttaacgctttttgaaaagaaaagagaaatgccagaacagcggcggcgacaaaccacgccacgccgctattgatcagggaaattgcgctcatttagcctctccactttgagcctgctgaaacaaggtgagatcgccaaagtccgtgttaaaggtcagctcacgcttacgtttgctgacgcgggcgatatcggtgttatccaccagatgcagggctttagtcgggcacatccgcacgcaggccggaccttgttcatcaaagctacaaaggtcacatttgacggcgatcgcgcgaatacctggcacccagtcaagcaatgtgctgacacgcgccggagcaggcggtgccggtggcgctttcggggtattggcgtttgccggaatatccagcggacggctgccggaaaattcaattgcgccaaacgggcaggcgatgccgcacagcttgcagcttacgcacaggctttcattcaactgcacggccccatcgacgcgggtgatggcgttaaccgggcagaccaccgcgcagggtgcatcttcacagtggtgacagagctgcggcgcagattctttttcattcagcatcactctcaggcgcggcatactttgcaggccgtgctggcgatgcgtctcactacaggcggcctcacaagtgtggcagccgatacagagcgtggagtcagcaattacaaaacgattcaccaggcattcctcaggtgattgtcatttttgacgaaaacatgccgatgaaatgtcattttcgacactcatcgacacgcccatccccaaacaggcgtaacgcctgcaaaacgggcaaagcctcagctcatgctgccgggctttgtccctttaccagttggcttaaattcaccggcacattgttttcaatagcggtgtataagctgtcgtaaacgccagcgattttttcgagatagtgttccagaacctgttcgcgatcgcggatgttgaccttgccatcaatcatgccgtcaatgctcagttgcgcctgcgcaatccgctgtttgtcttcgccatcttttgtttcgacgtaatactcgatggtgtggctgttaaagccatccgccagggtgacgtaaatgcgaaaatgttcaaaaaggacgaaacagagttctttgtccggcgcgcagctcatggcgtgatgcaggcgcgctttgcttaacgtgatcccctgaaccaggctattgcagtagatgtgccactggtcctgtaggcgacgatgccgctgtgcgatgtaatcggctttctcgcttatttcccaaatagtcattgtcaggttacccgtttaacagagatgccagctttaagcattttttgtgccaacttttaatttattgttattaaagagatttttaagctaaagatgaatttcgtcgccgtgtcgacgtgtcatttcgacatcatcgacattattcaccgcagggataatcaacactggcacaattattgcttgtagctggcaatagttaatgggaggcgatatgcacgaaataaccctctgccaacgggcactggaattgatcgaacagcaggccgcaaaacacggcgcaaaacgcgtaactggggtctggctcaaaattggcgcattttcttgtgtcgaaaccagctctcttgccttttgttttgatctggtttgccgcggcagcgtggcggaaggttgtaaactgcacctcgaagaacaagaggccgaatgctggtgtgaaacatgccaacagtatgtgacgctactgacccagcgcgtccgccgctgtccacagtgtcatggtgacatgctgcagattgtggcagacgacggtttacagattcggcggatagaaatagaccaggagtgagcgatgtgtacaacatgcggttgcggtgaaggcaacctgtatatcgagggtgatgaacataaccctcattccgcgtttcgtagcgcgccatttgccccggcggcacgcccgaagatgaaaatcaccggcattaaagcgcctgaatttacccccagccagactgaagaaggcgacctgcattacggtcatggcgaagcgggcactcacgcaccgggcatgagccagcgtcggatgctggaagtcgaaattgacgtgctggacaaaaataaccgtctggctgaacgcaaccgcgcgcgctttgctgcccgcaagcaactggtgctcaacctggtttccagccctggttccggtaaaaccaccctgctgacggaaaccctaatgcgcctgaaagacagcgttccgtgcgcagttattgaaggcgaccagcaaaccgtgaacgatgccgcacgcattcgcgctaccggcacaccagcgattcaggtgaacaccggtaaaggctgccatcttgacgcacagatgattgccgacgccgcaccgcgtctgccactggacgataacggtattctgtttatcgaaaacgttggcaacctcgtatgcccggccagcttcgatctcggtgaaaaacacaaagtggcggtgctttccgttaccgaaggtgaagacaaaccactgaaatatccgcatatgtttgccgccgccagcctgatgctgctcaacaaagttgacctgttgccgtatctcaactttgacgttgaaaagtgcatcgcctgcgcccgcgaagtcaatccagaaattgaaatcatccttatttccgccaccagcggcgaagggatggaccagtggctgaactggctggagacacagcgatgtgcataaggtaaaactggctggagacacagcgatgtgcataggcgttcccggccagatccgcaccattgacggcaaccaggcgaaagtcgacgtctgcggcattcagcgcgatgtcgatttaacgttagtcggcagctgcgatgaaaacggtcagccgcgcgtgggccagtgggtactggtacacgttggctttgccatgagcgtaattaatgaagccgaagcacgcgacactctcgacgccttacaaaacatgtttgacgttgagccggatgtcggcgcgctgttgtatggcgaggaaaaataatgcgttttgttgatgaatatcgcgcgccggaacaggtgatgcagttaattgagcatctgcgcgaacgtgctagtcatctctcttacaccgccgaacgccctctgcggattatggaagtgtgtggcggtcatacccacgctatctttaaattcggcctcgaccagttactgccggaaaacgttgagtttatccacggtccggggtgcccggtgtgcgtactgccgatgggtagaatcgacacctgcgtggagattgccagccatccggaagtcatcttctgtacctttggcgacgccatgcgcgtgccggggaaacagggaagcctgttgcaggcaaaagcacgcggtgccgatgtgcgcatcgtttacagcccgatggatgcgttgaaactggcgcaggagaatccaacccgcaaagtggtgttcttcggcttaggttttgaaaccactatgccgaccaccgctatcactctgcaacaggcgaaagcgcgtgatgtgcagaatttttacttcttctgccagcacattacgcttatcccgacgttgcgcagtttgctggaacagccggataacggtatcgatgcgttcctcgcgccgggtcacgtcagtatggttatcggcaccgacgcctataattttatcgccagcgattttcatcgtccgctggtggttgctggattcgaaccccttgatctactacaaggcgtggtcatgctggtgcagcagaaaatagcggcccacagcaaggtagagaatcagtatcgtcgagtggtaccggatgccggtaacctgctggcgcaacaggcgattgccgatgtgttctgtgtcaacggcgacagcgaatggcgcggcttaggcgtgattgaatcttctggcgtgcacctgacgccggattatcaacgattcgatgccgaagcacatttccgcccggcaccgcagcaggtctgcgatgacccgcgcgcgcgttgtggtgaggtattaacgggcaaatgtaagccgcatcaatgcccgctgtttggtaacacctgtaatcctcaaaccgcgtttggtgcgctgatggtttcctccgaaggagcgtgcgccgcgtggtatcagtatcgtcagcaggagagtgaagcgtgaataatatccaactcgcccacggtagcggcggccaggcgatgcagcaattaatcaacagcctgtttatggaagcctttgccaacccgtggctggcagagcaggaagatcaggcacgtcttgatctggcgcagctggtagcggaaggcgaccgtctggcgttctccaccgacagttacgttattgacccgctgttcttccctggcggtaatatcggcaagctggcgatttgcggcacagccaatgacgttgcggtcagtggcgctattccgcgctatctctcctgtggctttatcctcgaagaaggattgccgatggagacactgaaagccgtagtgaccagcatggcagaaaccgcccgcgcggcaggcattgccatcgttactggcgatactaaagtggtgcagcgcggcgcggtagataaactgtttatcaacaccgctggcatgggcgcaattccggcgaatattcactggggcgcacagacgctaaccgcaggcgatgtattgctggtgagcggtacactcggcgaccacggggcgactatccttaacctgcgtgagcagctggggctggatggcgaactggtcagcgactgcgcggtgctgacgccgcttattcagacgctgcgtgacattcccggcgtgaaagcgctgcgtgatgccacccgtggtggtgtaaacgcggtggttcatgagttcgcggcagcctgcggttgtggtattgaacttagtgaagcggcactgcctgttaaacctgccgtgcgtggcgtttgcgaattgctgggactggacgccctgaactttgccaacgaaggcaaactagtaatagctgttgaacgcaacgcggcagagcaagtgctggcagcgttacattcccatccactggggaaagacgcggcgctgattggtgaagtggtggaacgtaaaggtgttcgtcttgccggtctgtatggcgtgaaacgaaccctcgatttaccacacgccgaaccgcttccgcgtatatgctaataaaattctaaatctcctatagttagtcaatgaccttttgcaccgctttgcggtgctttcctggaagaacaaaatgagttatacaccgatgagtgatctcggacaacaagggttgttcgacatcactcggacactattgcagcagcccgatctggccagcctgtgtgaggctcttagccaactggtaaagcgttctgcgctcgccgacaacgcggctattgtgttgtggcaagcgcagactcaacgtgcgtcttattacgcgagccgtgaaaaagacacccccattaaatatgaagacgaaactgttctggcacacggtccggtacgcagcattttgagccgccctgatacgctgcattgcagttacgaagaattttgtgaaacctggccgcagctggacgcaggtgggctatacccaaaatttggtcactattgcctgatgccactggcggcggaagggcatatttttggtggctgtgaatttattcgttatgacgatcgcccctggagcgaaaaagagttcaatcgtctgcaaacatttacgcagatcgtttctgtcgtcaccgaacaaatccagagccgcgtcgttaacaatgtcgactatgagttgttatgccgggaacgcgataacttccgcatcctggtcgccatcaccaacgcggtgctttcccgcctggatatggacgaactggtcagcgaagtcgccaaagaaatccattactatttcgacattgacgatatcagtatcgtcttacgcagccaccgtaaaaacaaactcaacatctactccactcactatcttgataaacagcatcccgcccacgaacagagcgaagtcgatgaagccggaaccctcaccgaacgcgtgttcaaaagtaaagagatgctgctgatcaatctccacgagcgggacgatttagccccctatgaacgcatgttgttcgacacctggggcaaccagattcaaaccttgtgcctgttaccgctgatgtctggcgacaccatgctgggcgtgctgaaactggcgcaatgcgaagagaaagtgtttaccactaccaatctgaatttactgcgccagattgccgaacgtgtggcaatcgctgtcgataacgccctcgcctatcaggaaatccatcgtctgaaagaacggctggttgatgaaaacctcgccctgaccgagcagctcaacaatgttgatagtgaatttggcgagattattggccgcagcgaagccatgtacagcgtgcttaaacaagttgaaatggtggcgcaaagtgacagtaccgtgctgatcctcggtgaaactggcacgggtaaagagctgattgcccgtgcgatccataatctcagtgggcgtaataatcgccgcatggtcaaaatgaactgcgcggcgatgcctgccggattgctggaaagcgatctgtttggtcatgagcgtggggcttttaccggtgccagcgcccagcgtatcggtcgttttgaactggcggataaaagctccctgttcctcgacgaagtgggcgatatgccactggagttacagccgaagttgctgcgtgtattgcaggaacaggagtttgaacgtctcggcagcaacaaaatcattcagacggacgtgcgtctaatcgccgcgactaaccgcgatctgaaaaaaatggtcgccgaccgtgagttccgtagcgatctctattaccgcctgaacgtattcccgattcacctgccgccactacgcgagcgtccggaagatattccgctgctggcgaaagcctttaccttcaaaattgcccgtcgtctggggcgcaatatcgacagcattcctgccgagacgctgcgcaccttgagcaacatggagtggccgggtaacgtacgcgaactggaaaacgtcattgagcgcgcggtattgctaacacgcggtaacgtgctgcagctgagtttgccagatattgttttaccggaacctgaaacgccgcctgccgcaacggttgtcgccctggagggcgaagatgaatatcagttgattgtgcgcgtgctgaaagaaaccaacggcgtggttgccgggcctaaaggcgctgcgcaacgtctggggctgaaacgcacgaccctgctgagtcggatgaagcggctgggaattgataaaagcgcattgatttaactgcaaattgccggacagatctgcctgtccggcatattattcatgaggttttttcggacgatatttttccggcagttctggcaccggacgcttgtcatcgatgagatgacgcacggttaagatcggatgacgccacagcattctcggcccggcccaacgcataatctgtttcatctcttcacgctttgcaggctggtaacagtgcaccggacactgcttacaggctggtttctcttcgccgaacacacatttatccagccgcttttgcgcgtaaacaaacaacgcctcgtaatgctccggctccgcactcgcctgcgggcatttcgcttgataaagatcgatcatttttttaatcgtcagtttttcacgagagatacgcttgccggacatgctgcctccacctcattaagatgtatttatattacatcttaatcttaaagggcactatgactccaaagaagaagggttagccaaccgatacaattttgcgtacttgcttcataagcatcacgcaaaagctgcaaaacagcatctttcccggaaccagcatcaagaactcgccgttcgcttcttcccctgaaatgattaactccggtatcatgtgcgccttatgtgattacaacgaaaataaaaaccatcacaccccatttaatatcagggaaccggacataaccccatgagtgcaatagaaaatttcgacgcccatacgcccatgatgcagcagtatctcaggctgaaagcccagcatcccgagatcctgctgttttaccggatgggtgatttttatgaactgttttatgacgacgcaaaacgcgcgagccaactgctggatattagtctgaccaaacgcggtgctagcgcgggagagccgatcccgatggcggggattccctaccatgcggtggaaaactatctcgccaaactggtgaatcagggagagtccgttgccatctgcgaacaaattggcgatccggcgaccagcaaaggtccggttgagcgcaaagttgtgcgtatcgttacgccaggcaccatcagcgatgaagccctgttgcaggagcgtcaggacaacctgctggcggctatctggcaggacagcaaaggtttcggctacgcgacgctggatatcagttccgggcgttttcgcctgagcgaaccggctgaccgcgaaacgatggcggcagaactgcaacgcactaatcctgcggaactgctgtatgcagaagattttgctgaaatgagcttaattgaaggccgtcgcggcctgcgccgtcgcccgctgtgggagtttgaaatcgacaccgcgcgccagcagttgaatctgcaatttgggacccgcgatctggtcggttttggcgtcgagaacgcgccgcgcggactttgtgctgccggttgtctgttgcagtatgcgaaagatacccaacgtacgactctgccgcatattcgttccatcaccatggaacgtgagcaggacagcatcattatggatgccgcgacgcgtcgtaatctggaaatcacccagaacctggcgggtggtgcggaaaatacgctggcttctgtgctcgactgcaccgtcacgccgatgggcagccgtatgctgaaacgctggctgcatatgccagtgcgcgatacccgcgtgttgcttgagcgccagcaaactattggcgcattgcaggatttcaccgccgggctacagccggtactgcgtcaggtcggcgacctggaacgtattctggcacgtctggctttacgaactgctcgcccacgcgatctggcccgtatgcgccacgctttccagcaactgccggagctgcgtgcgcagttagaaactgtcgatagtgcaccggtacaggcgctacgtgagaagatgggcgagtttgccgagctgcgcgatctgctggagcgagcaatcatcgacacaccgccggtgctggtacgcgacggtggtgttatcgcaagcggctataacgaagagctggatgagtggcgcgcgctggctgacggcgcgaccgattatctggagcgtctggaagtccgcgagcgtgaacgtaccggcctggacacgctgaaagttggctttaatgcggtgcacggctactacattcaaatcagccgtgggcaaagccatctggcacccatcaactacatgcgtcgccagacgctgaaaaacgccgagcgctacatcattccagagctaaaagagtacgaagataaagttctcaccagtaaaggcaaagcactggcactggaaaaacagctttatgaagagctgttcgacctgctgttgccgcatctggaagcgttgcaacagagcgcgagcgcgctggcggaactcgacgtgctggttaacctggcggaacgggcctataccctgaactacacctgcccgaccttcattgataaaccgggcattcgcattaccgaaggtcgccatccggtagttgaacaagtactgaatgagccatttatcgccaacccgctgaatctgagcccgcagcgccgcatgttgatcatcaccggtccgaacatgggcggtaaaagtacctatatgcgccagaccgcactgattgcgctgatggcctacatcggcagctatgtaccggcacaaaaagtcgagattggacctatcgatcgcatctttacccgcgtaggcgcggcagatgacctggcgtccgggcgcagtacctttatggtggagatgactgaaaccgccaatattttacataacgccaccgaatacagtctggtgttaatggatgagatcgggcgtggaacgtccacctacgatggtctgagcctggcgtgggcgtgcgcggaaaatctggcgaataagattaaggcattgacgttatttgctacccactatttcgagctgacccagttaccggagaaaatggaaggcgtcgctaacgtgcatctcgatgcactggagcacggcgacaccattgcctttatgcacagcgtgcaggatggcgcggcgagcaaaagctacggcctggcggttgcagctctggcaggcgtgccaaaagaggttattaagcgcgcacggcaaaagctgcgtgagctggaaagcattagcccgaacgccgccgctacgcaagtggatggtacgcaaatgtctttgctgagtgtaccagaagaaactagccctgcggtcgaagctctggaaaatcttgatccggatagtctcaccccgcgtcaggcgctggagtggatttatcgcttgaagagcctggtgtaataacaattcccgatagtcttttgctatcgggaatattaacgacaactgacgaataaaataaaaacaccctgtataataggaaagcttattttacagggtaaaaccatgccatctacacgctatcaaaaaatcaatgcccatcactatcgccatatatgggtcgttggtgatattcatggtgaatatcagttattacaatcccgcttacatcaactctcttttttccccaaaatcgacttacttatttctgtcggcgataatattgatcgtggaccggagagtcttgacgtcctgcgcctgctaaaccaaccctggtttacgagcgttaaaggcaaccacgaagcgatggcgcttgaggcattcgaaactggcgatggcaatatgtggcttgccagcggtggtgactggtttttcgatttaaatgatagtgagcaacaagaggcaatagatctgttgctgaaattccatcaccttccacatattattgaaatcactaacgacaacataaaatatgccatcgcacatgcagattatccggggagtgaatatctctttggtaaagaaatagcggagagcgaattactctggcctgttgatcgtgtgcagaaaagccttaatggcgagttacaacaaataaacggcgctgattattttatatttggacatatgatgtttgataacattcagacgttcgctaaccagatttatattgataccggaagcccgaacagcgggcggctgagtttttataaaataaagtaatctcatgcttcttctgtgaagcatgagtaacccggtgttattgcaggccattattcatttttcgctaccagcaaagagagatcctgcttcaccagcgcgcgactggcactctccggcaaaccgtcgtctgtaataatctgatcaaactcgcttaatggtaacgccagccatgtcgccacctgaccatatttcgtcgcatcacagaccaaaactcgctggcggctggcactggcaatcgcccgtttcaccgtgactttatcttccgctggcgtagaaatcccccgcacactccaactgcttgcagaaataaaagcctgatcaatcatcaggctgcgcagcatggtcgcagcggcttccccgacacaggaacggttttcccgacacactgcaccgccagtgtgaataattgtgcaattactgttgtcgagcaagtagtccgcaataacgaaatcgtttgtgaccacagtcagactctccatgtgaatcagatgctgtgctatcgctaacgtggtcgttcccgcatccagatagatacaacttcccggctgaacaagacttgccgccagcttgccaatagccgctttttgcgtcattgccagcgcagtttttacctgatgagaaggttcatgcgccacgcgtcccggagactggacgcctccggacaccagcacaacggctccctgctgctccagtttttgtaaatcccgacgaatggtcatatgactcacattcattctgtccgttagttcagcaatactgacaatgcctttttcagctaccatctcaaggatgatttggcgacgctctacgggtatcaacttttgctccttcctttgtcctgcactcattctacgctatttgcctgcgaaacgtgcgcggcgcaactaacgcttagttcacataaaataacacacaatgttaatttatgtgaatcagatcaccataccgttatcttccagcgcttatattcacaatatcaaacaaaatatcacttaaattaacaaggagagcagatgaaaacgggatctgagtttcatgtcggtatcgttggcttagggagtatgggaatgggagcagcactgagttatgtccgcgcaggtctttctacctggggcgcagacctgaacagcaatgcctgcgctacgttgaaagaggcaggtgcttgcggggtttctgataacgccgcgacgtttgccgaaaaactggacgcactgctggtgctggtggtcaatgcggcccaggttaaacaggtgctgtttggtgaaacaggcgttgcacaacatctgaaacccggtacggcagtaatggtttcttccactatcgctagtgctgatgcgcaagaaattgctaccgctctggctggattcgatctggaaatgctggatgcgccagtttctggtggtgcagtaaaagccgctaacggtgaaatgactgtcatggcctccggtagcgatattgcctttgaacgactggcacccgtgctggaagccgttgccggaaaagtttatcgcataggtgcagaaccgggactaggtagcaccgtaaaaattattcaccagttgttagcgggcgtacatattgctgccggagccgaagcgatggcacttgcagcccgtgcggggatcccgctggatgtgatgtatgacgtcgtgaccaatgccgccggaaattcctggatgttcgaaaaccggatgcgtcatgtggtggatggcgattacaccccgcatagtgccgtcgatatttttgttaaggatcttggtctggttgccgatacagccaaagccctgcacttcccgctgccattggccagtacagcattgaatatgttcaccagcgccagtaacgcgggttacgggaaagaagacgatagcgcagttatcaagattttctctggcatcactctaccgggagcgaaaagttgagctaaactctaccgggagcgaaatcatgatcaagattggcgttatcgccgatgattttaccggcgcgacggatatcgccagttttctggtggaaaacggtctaccaacggtacaaattaacggtgttccaacaggtaaaatgccggaagcaatcgacgcactggtgatcagcctgaaaacgcgctcctgtccagtggttgaagccacacagcaaagcctggcggctctgagctggttgcaacagcaaggttgcaaacagatctatttcaaatactgctctactttcgacagtacggcgaaaggtaatattggcccggttaccgatgccttaatggatgctctcgacacgccgtttacggtcttctctccggccctgccggtcaacggacgtacggtttatcaggggtatttgttcgtaatgaatcaactgctggccgaatccgggatgcgccatcacccggtaaatcccatgaccgacagctatcttccccgtctggttgaagcgcaatccacagggcgctgcggcgtcgttagcgcacatgttttcgaacaaggtgtggatgccgttcgtcaagagctggctcgcttacagcaagagggctaccgctacgcggtgcttgatgcgctgaccgaacaccatctggaaattcagggagaagccttgcgcgatgccccactggtaacgggcggttctggtctggcgattggcctggcccggcagtgggcgcaagaaaacggtaaccaggctcgcaaagcagggcgtccgctcgctgggcgcggcgtagtgctctccggtagttgctctcaaatgaccaaccgccaggtagcacattaccgtcaaattgcaccagcccgtgaagttgatgtggcacgctgcctcagtattgaaactctggccgcttatgcacacgaactggcagagtgggttctgggccaggaaagtgtacttgctccactggtttttgccaccgccagcactgacgcattggcagcaattcaacagcaatacggtgcacaaaaagccagtcaggcagtagaaacactgttttctcaactagcggcgcggttagcagcggaaggcgtgacacgctttattgtcgcaggcggtgagacctccggcgtagtcacacagagcctgggaataaaagggtttcatattggcccaaccatttccccggcgtgccgtgggtaaacgcactggataagcctgtctcactcgcccttaaatctggcaacttcggtgatgacgcctttttttcacgagcccaaagagagtttttatcatgagcgatttcgcaaaagtagagcagtctttgcgagaggagatgacgcggattgccagtagtttctttcagcgcggctatgcaaccggtagcgctggcaatctgagcctgcttttacctgacgggaatttactggcgacaccgacaggtagttgcctgggcaatctcgatccgcagcggctttccaaagtcgccgcggatggcgaatggttaagtggtgacaaacccagcaaagaggtgctctttcatctggcgctgtatcgcaacaatccgcgctgtaaagcggtggtgcatttgcacagcacatggagcacggcgctttcctgcctgcaagggctggacagcagcaacgttattcgtccgttcacaccatacgtggtgatgcggatgggaaatgtcccgctggtgccttattaccgaccgggcgataaacgcatcgcacaggatctggcggaactggcagcagacaatcaggcttttttactggcaaatcatggcccagtggtttgcggtgaaagcctgcaagaagccgccaacaatatggaagagctggaggaaacggcaaagctgatttttattctcggtgaccgcccgatccgttatctgaccgcaggtgaaattgcggaattaaggagttaatgcaatgcctcgttttgcagctaatttatccatgatgttcaccgaagtgccttttattgaacgcttcgccgcagcgcgaaaagccgggttcgatgctgtggaatttctgtttccctataactactccaccctgcaaatccaaaagcaactggagcaaaaccatctgacactggcgctgttcaataccgctcccggagatattaatgcgggggaatggggattatccgcccttcccggacgtgagcacgaagcacacgcagacatcgacctggcactggaatatgcattggcgctcaattgtgaacaagtccatgtgatggcaggcgtcgtgcccgctggcgaagatgctgaacggtaccgggcagtatttatcgataatatccgctacgctgccgaccgctttgcgccacacggcaagcgaatattagttgaagcactcagccccggcgttaagcctcattatctcttctccagccagtatcaggcactggctattgttgaagaggttgcgcgagataacgtgtttattcaactagatacttttcatgcgcaaaaagtagatggcaacctgacgcatttaatccgcgactacgccgggaaatatgcgcacgtacaaattgccggactacctgatcgacatgaaccggacgatggagaaatcaactatccgtggctgttccgcctgttcgatgaggtgggatatcagggctggatcggttgtgaatataaacctcgtggcctcaccgaagaagggcttggctggtttgacgcctggcgctaattcgttaaatccctaattacaacgtacccatacatccccccatctacggatggggtaggttaactataactttcagacagggtttcccatgtccacaattacattgttatgcattgcgttagctggcgtaatcatgctgttgctgctggtcatcaaggcaaaggtacaaccattcgttgctttgctcctcgtcagcctgttagtcgcacttgcggcaggtataccggcgggcgaagtgggtaaagtgatgatcgccgggatgggcggtgtgcttggttccgtcactattattattggtctgggcgctatgctggggcgtatgatcgaacactctggtggtgcagagagtctggctaattatttcagtcgcaagttaggtgacaaacgaactatcgctgcgctgactctggcagcgttcttcctcggtattcccgtcttctttgatgtcggctttattattcttgcgccaatcatttacggttttgccaaggttgccaaaataagcccactcaaatttggcctgcctgtcgctgggatcatgctcactgttcacgtggcggtaccgccgcatccaggccctgtcgccgcagcggggttactccacgcagacatcggctggctaaccatcatcggtattgcgatttctattcccgtaggggttgttggctactttgcagcgaaaataatcaataagcgccaatatgcgatgagtgtagaagtactggaacagatgcaactggctccggccagtgaggaaggcgcgacaaaattaagcgataaaataaatccaccgggcgtcgcgctggtcaccagcctaattgttattcctatcgcgattatcatggcgggtacggtttccgcaacactgatgccgcctagccatcccctgcttggtacgctacagctgatcggcagtccaatggtagctctaatgattgcgctggtgctggcattctggttattggctttacgtcgcggctggagcttacaacacaccagcgacattatgggcagtgcgcttcctactgcggcggtagtgattttggttactggtgctggaggggtatttggcaaagtgctggtggaaagcggcgtcggcaaagcccttgccaacatgctacaaatgattgacctgcctctgttaccagccgcatttattattagtctggcgctgcgtgcaagccaggggagtgcaaccgtagcaatactgacaaccggcgggttactcagtgaagcggtgatgggattgaatccgattcagtgcgtattggtgacgctggcagcctgctttggtgggcttggtgcgagtcatattaatgacagtgggttctggattgtgaccaaatatctggggttgagcgtagcagacggtctgaaaacctggacagtgttaacgaccattctcggttttaccggattcttaattacctggtgcgtatgggcggtaatttgaccttaataaaaaggtccgatgggcatcggaccttttattgtgcacagaaaaggccagcctcgcttgagactggcctttctgacagatgcttacttactcgcggaacagcgcttcgatattcagcccctgcgtttgcaggatttcgcgcaaacggcgcaggccttcaacctgaatctggcgaacacgttcacgggtgaggccaatttcacgacctacatcttccagtgttgccgcttcgtaccccagcaaaccgaatcgacgtgccagcacttcacgctgtttggcgttcagctcgaacagccatttgacgatgctctgcttcatatcgtcatcttgcgtggtatcttccggaccgttctctttttcatcggccaggatgtccagcaacgctttttcggaatcaccacccagcggggtgtctacgctggtaatgcgctcgttaagacgaagcatacggctgacgtcatcaactggcttatccagttgctctgcgatctcttccgcacttggttcatggtccagcttatgggacaactcacgtgcggttcgcaggtaaacgttcagctcctttacgatgtgaatcggcaaacgaatagtacgggtttggttcataatcgcccgttcaatcgtctggcgaatccaccaggttgcgtatgtactgaagcggaaaccacgttccgggtcaaacttctctaccgcgcggatcagccccaggttgccctcttcgataaggtccagcaacgccagaccacgattgccataacggcgggcaatttttaccaccagacgcaagttactctcgatcatccggcggcgagaggcgacatctccacgcagtgcgcgacgcgcaaaataaacttcttcttcggccgttaacagtggactataaccaatctcaccaaggtaaagctgagtcgcgtccaacacacgctgtgtggctccctggcttaacagttcctcttcggccaaatcgttatcactgggttcctgttctactaaggccttttcgtcaaaaacctcaactccgttctcatcaaattccgcatcttcatttaaatcatgaactttcagcgtattctgactcataaggtggctcctacccgtgatcccttgacggaacattcaagcaaaagcctggttccgccgatttatcgctgcggcaaataacgcagcgggtttacggatttccccttgtaacgaatttcaaaatgcaagcgtgtactactggttccggtgctacccatggtcgctattttttgccccgccttaacttcttgttgttcccggaccagcattgtgtcgttatgggcgtaggcactcaggtaatcatcattatgtttgatgataatcagattaccgtagccgcgcagcgcgttaccagcataaacaacgcggccatctgcggtcgcgataattgcctgtcctttgctgcctgcgatatcaatccccttgttgcccccctcagaagcgccaaaggtttcgatcactttgccctcagtcggccagcgccaggtggagataggcgtactggtacttgtactgctgacagtcggctcggttgtgcttgctgttggtaccgttacaggcgctgtgaccgtggtcgcagttggcttgttgttcggcaacattttgttagcactctgttcaccgctagactcagaatacgtaattgtcggttggctcgcaacagcaacggtggaattttgtgcaggcttgatcacaactccttgctctgctgcgtcggcctgggtaatggcatttccgccagtgattggcgtaccggaagcattacccacctgcaaggtctgaccaacgttcagcgcgtatggtgcctgaatattgttgcgctgagcaaggtcacggaaatcgttgccagtaatccaggcgatatagaaaagtgtgtcgccttttttcacggtataggtactgccgctataactgcctttcggaatgttcccatactgacggttatagacgatgcgtccgttttccatctgtaccggctgctgagctactggctgcactggctggatttgcggttgttgagtagcctgaatttgtggctgctgcaccggctgaatttgcggttgctgcgctgtagacgtcgtccccattttcggcggcggcgtaatcaacataccagaattagtatttgcaggcgcattgccattaacggagctgaccggtgccggtggattactagtgtcagaacagcctgccagccataggctaaccagactcaaagccgcaatgcggcgaacggtgaattttgggcttcccgcgctcatttatcccccaggaaaaattggttaataaccagtgacataattaccgtgcaaggcaccctactgaacactggaaaagatgttcacgatacgctgacctgcggcaaaataaccaggaaaaatccaggtatttcctcacgttttaagccagctcacccttcactaaagggacaaagcgcacggcctccacggtatcgataataaattcgcctccccgacgacgcacccgtttcaaatactggtgctcctcccctacgggtaagacgagaatcccgccttcgtccagctgcgtcattagcgcagttggaatttccggcggtgccgccgtaacaatgatagcgtcaaacggcgcacgtgcctgccaaccttgccatccatcgccatgacgggtactaacattatgtaaatcaagatttttcaggcggcgacgtgcctgccactgcaagcctttaatccgttcaacgctgcaaacatgctggacaagatgcgccaggattgccgtttgatatccgctaccggtgccaatttccagcacccggctctgcggcgtcagctcgagtaattcggtcattcgcgccaccatatatggctggctaattgtctgcccctgacctatcggcaaagcgatattgtcccaggctttttgttcaaacgcttcatcaacgaatttttcacgcggcacggcggcaagtgcattcagcacctgctcatcctgaataccttgcgcacgtaattgatccagaagtgcttgtacgcgtctgcttaccattgcgtgccaactcccacgctgtttaaccagtcactaaccacatcttgcgcgctatgcgcagttaaatccacatgcagcggcgtgatggagacatagccctcatctaccgcagcaaaatcggtccccggaccagcatcacatttaccgcccggcgggccaatccagtacagcgtattgccgcgcggatcttgctgcgggatcacctgatctgccggatgtcgtgtaccgcagcgcgtcacgcgaatacctttgatttgatccaagggtaaatccggaacgttaatattaagaatacgcccggtgcgcagcggctctttacacagtgcgcgcaaaatactacaggttaccgccgcggcagtgtcgtaatgtttatgcccgtcaaggctgacggcaagcgccggaaaacctaaatgacggccttccatcgcggcggctaccgtaccggaataaataacatcatcccccagattcggcccggcgttaattccggacacaacaatgtccgggcgcggacgcatcagagcattcacgccaagatagacgcaatcggtcggggttcccatttgcacagcaatatcaccattttcaaaggtaaacgtgcgcagggaggattccagtgtcagagaattactagcgccgctgcggttacgatcgggggcgaccacctgaacgtcagcaaactcacgcaaggctttcgccagcgtttgtataccgggtgcatgtaccccgtcatcattactcagcaatatgcgcataatcacctgttgtgttgataagttccctgacaacgctggttgcaaaactacccgccggaagccagaaacggatctctacggtgacgtcatcccaccaattccagcttaattgttgcggatacagcagcatcgctctgcgcgcggcttcaactttttcgcgcaccagtaaagcttgtaattcagtttctgcggcgacagctgcttgttcgaatgccagcgcttcacgctgagttccccattcgccactgcctggcaatgcggcggttatcatcaactctttatcgttgacgcgacgctgtaattccgccagttcttcggtggttgcgacaaaccagctaccacgtccggctaattgtagcgcatcgccgtcaacaacttgattaacgtctgcttttttgaggcgctcagcaacaatctgattaaacaacgcactgcgggctgcgctcaaccaaaaactccgtttattgcgatcgcgcaccggagtattggtttgcgcccagcgctgcgccccctgcaagttgctaccgccaatcccaaaacgttgggcaccgaagtagttcggtacaccttttacgcaaatatcgatcagacgttgttcaacgtcatcgcgattgctcacttcgcgcagaaccagggtaaaggcgttacctttcagcgcgcctaaacgcagcttgcgcttgtgccgcgcatactccagcacctggcagccttccagttgaaaggcgctcagatcgggcatttccttgcccggcacgcgagcgcataaccactgttccgtaacagcatgtttgtctttttgcccagcgaagctgacttcacgggcatgaattttcaggaatttcgccagtgcatccgccacaaaacgggtattgcagccgtttttgaggattctaaccagaatatgctcaccttcaccatcaggctcaaagcccaaatcttccaccaccacaaagtcttccggattggctttcagcagcccggtgccttgcggtttaccgtggaggtaagtgagattatcaaactcaatcattttgttgccttaatgagtagcgccaccgcttcacaggcaatcccttccccacgtccggtaaatcccagtttttccgtagtagtggctttcacgttaacatcatccatatggcagccgagatcttcggcaataaacacgcgcatttgtggaatgtgcggcaacatcttcggtgcctgagcgatgatagtgacatcgacgttgccaagggtataacccttcgcctgaatacgacgccaggcttcgcgtagcagctcgcggctatcggcacctttaaatgccggatcggtatccgggaacagcttgccgatatcccccagcgccgccgcgccaagcaatgcatcggtcaacgcatggagcgccacgtcgccatcagaatgcgccagcaatcctttttcgtaaggaatgcgtacgccaccaatgataattgggccttcaccgccaaaggcatgtacgtcaaaaccgtgtccaattcgcattatgtattctcctgatggatggttcgggtgaggtaaaactcggccagtgccaaatcttccgggcgcgtgactttaatgttatccgcacggccttcgaccaactgaggatggaatccgcaatattccagcgcgctggcttcgtcggtaatagtcgcgccttcatttagagcgcgcgtcagacagtcatgtaacagctcacgagggaaaaattgcggcgtcagcgcgtgccataagccgttgcgatcaacggtatgagcaatggcatttttgcccggttcggcacgtttcatagtatcgcgcactggtgcggcgaggatcccccccgtgcggctggtttcgctcaacgccaacaatcgcgcgaggtcatcctgatgcaaacaaggacgagcggcgtcatgcaccaatacccactgcgcgtcgccagcggctttcagacctgccagcacggaatcggcacgctcatcaccgccatctacaacggtgatttgcggatgattcgccagaggaagttgtgcaaaacggctatcgccaggacttatggcaatgacgacacgtttcacccggggatgcgccagcagcgcatgcacgctgtgttcaagaatggtttgattaccgatactgagatattgcttaggacattccgtttgcattcgacggccaaatccggccgccggaaccacggcgcaaacatccaaatgagtggttgccatgttaattcccgggctgatttatcgattgttttgccccgcagactgtgcgcgcttgctcgcgtcaggcaccagacgataaaaagtttcgcccggcctggtcatgctgagttcattacgcgcacgctcttcgagcgcctcctggccgccattgagatcgtcaatttcggcaaaaagttgatcgtttcgcgctttaagtttcgcgtttgtagcttgctgtgccgccacatcatcattgacgcgggtatagtcatgtataccgttcttaccgaaccacaggctatactgtagccagaccagaatagccagcaacagcagcgttagtttacccatcctgccccctgaaaaacggcatcatcatcccatgcatccgaagacgactctacatcctctgttggggataccgcgacaacgcgggcaaatgtaccacatttgtccattgttacgtatacccagggcgtgcagaacataatctcattattagttacggtttgaattatgaacagaggagacgggaaagtacaaattagcccagtagccacataaacagtgcgccaaacataatgcctactgtcaccagggtgaaaacaatactgtagcgtagctttccgtccatcaaactatgcagcgcaatccccaccactaccgcgacgggcatcagcgccagaaagaaaggccaggtgtagataaagaagaacagcgtgttagagccataaatcaacatcggcatcgccagcgcaaataaccaggagataaaaccgaccacggcaccaggcagactccatgtggtttcttcatcctcagtaaggctgtcgttatttgttagtgtaatgttatggctattacgcatatttgatcctgttactttgacgaaccgggcatggaaacccggtggtgtctcaggatctgataatatcgttctgtctcaacagatctaataattgctgtaccaaatttgttactaattgttcaccattgagatgaatttctgcgctttcaggcgcttcgtaaacggaatctattcccgtaaagttgcgcagttcaccggcacgcgctttcttatataagcctttgggatcgcgggcttcgcaaatcgccagcggcgtatcgacaaacacttcgataaagcgcccttctcctacgcgttcgcgaaccatctggcgttcggcgcggtgtgggctgataaatgcggtcagcaccaccagtccggcttcaaccatcaaattcgccacttcaccgacgcgacggatattctctttacgatcggcatcgctaaaaccgagatcgctgcataatccgtggcgaacattgtcgccatccagcagatacgtactgacgccgagtttatgtaacgcctcctccagcgccccggcgaccgtacttttaccggacccggagaggccggtaaaccacagcactacaccacgatgaccgtggtgtagctcgcgttgttgcacagtgaccggatggctatgccagacgacgttttcgtcatgcagcgccattatttatcccccagcaaatcgcgcgcgccccagtgcggaaagtggcgacgaaccagagcattcaattccagttcgaatgcactgaattcagatggcgcagcagttgcctggctaactggctcgtgcaccataccggcacccacggtcacattgctcaggcgatcgataaaaatcagcccacccgtcaccggattttgttgataacgatctaacaccagcggctcgtcaaaagtgagatccacgaggccgatcccattcagtggcaggttttcaacttcacgctgggtaaggttattaatatcaacctgatagcgaatgccatcaacacgcgcgcgcgtcttcttaccggcaattttgatgtcgtaactctgccctggagaaagcggctgttccgccatccataccacatccacgctcgcgctctgcaccgccggtaacgcttcgtctgccgccagcagcagatcgccacggctgatgtcgatctcatccgtcagcaccagggtgatcgcttctccggcaaaggcttcttcgcgatcaccatcaaaagtcacgatccgcgcgacgttactttccacaccagagggcagcactttgacacgttgcccgacttccacgcgaccggatgccagcgttccggcgtaaccacgaaaatcgagattcgggcgattaacgtactgcaccgggaagcgcattggctgagcatccaccactcgctggatctccacggtttccagcacttcgagcagtgtcggaccgctgtaccacggcatactttcactttggcttgccacgttgtcgccttccagtgcagagagcggcacaaagcggatatccagattacccggcagctgcccggcaaaggtcaaataatcttcacgaatacgggtgaacgtctcttcactgtaatccaccagatccattttgttgatcgccacgaccagatgtttgatccccaacagtgtggagataaaactgtgacgacgggtttgatcgagcacgcctttacgggcatcgatcagtaagatcgccagttcacatgtgcttgcgccagtcgccatattgcgggtgtactgctcgtgccctggggtgtcggcgataataaatttacgcttctcggtagagaaatagcggtaggccacgtcaatggtgatgccctgttcgcgctcagcttgcaggccgtccaccagcagagccagatccagcttttcgccctgggtgccgtgacgcttactgtcgttatgcaggctactgagctgatcttcgtagatttggcgggtatcgtgcagcagacgaccaatcagagtacttttgccgtcatcgacgctaccacaggtcagaaaacgcagcaggcttttatgttgttgcgcaatcatccaggcttcgacgccgccttcattggcgatttgttgtgcaagtgcggtgttcatcttaaaaatacccctgacgttttttcagctccatagaccccgcctggtcgcggtcaatcacgcggccctgacgttcactggtggtggaaaccagcatctcttcgatgatttccggcagtgtttgtgcattactctccaccgcaccggtcagcggccagcagcccagcgtacggaaacgcaccatccgttttttaatcacttcgcccggttgcaggtcgatacggttgtcatcaatcatcatcaacataccgtcgcgttccagaaccggacgttccgcagcgagatatagcggaacaatgtcgatattttccagccagatgtattgccagatatcctgctcggtccagttagagagcgggaagacgcggatgctttcgcctttgttaatttgcccgttgtagttgtgccacagctccgggcgctgatttttcggatcccagcgatggaagcggtcacggaaagagtaaattcgctctttagcgcgggatttctcttcgtcacggcgcgcaccaccgaaggcggcatcaaaaccgtatttgttcagcgcctgtttcaggccttcagttttcataatatcggtatgtttcgcgctgccgtgcacgaatggattaatccccatcgccacgccttccgggtttttatgcaccagcagttcgcagccgtaggctttagcagtacgatcgcggaactcatacatctcgcggaatttccagccggtatcgacatgcagcaacgggaaaggcagcgtacctggataaaacgccttgcgcgccagatgcagcatgacgctggaatctttaccgatagagtagagcatcaccggattactgaattctgccgccacctcgcgaataatgtggatgctttccgcctccagttgccgcaggtgagtaagtcgtatttgatccataaccgttcctttgcaataccgctattttcttgccatcagatgtttcgactatagggagcgtaagagaacgaatgaaattaccaattagaatgagtagttccttaacggaataacgatttggcaaagctaatatcaaaaagtgcttaaggcaccggatttcgggcgtttaggaagatttgaaattgttttagcgcagcggcagtttcatactatggcggtaaaaaaatttgcatggtatttaaggactcactatgttttccgcattgcgccaccgtaccgctgccctggcgctcggcgtatgctttattctccccgtacacgccagcagtcctaaacctggcgattttgctaatactcaggcacgacatattgctactttctttccgggacgcatgaccggaactcctgcagaaatgttatctgccgattatattcgccaacagtttcagcaaatgggttatcgcagtgatattcggacatttaatagtcggtatatttataccgcccgcgataatcgtaagagctggcataacgtgacgggaagtacggtgattgccgctcatgaaggcaaagcgccgcagcagatcatcattatggcgcatctggatacttacgccccgctgagcgatgctgacgccgatgccaatctcggcgggctgacgttacaaggaatggatgataacgccgcaggtttaggtgtcatgctggaattggcagaacgcctgaaaaatacgcctaccgagtatggtattcgatttgtggcgaccagcggcgaagaggaagggaaattaggcgctgagaatttactcaagcggatgagtgacaccgaaaagaaaaatacgctgctggtgattaatctcgataacttaattgttggcgataaattgtatttcaacagcggtgtaaaaacccctgaggcagtaaggaaattaacgcgcgacagggcgctggcaattgcgcgcagtcacggaatagccgcaacgaccaatccgggtttgaataaaaattatccgaaaggcactgggtgttgtaatgacgcagaaatattcgacaaagcgggcattgctgtacttagcgtggaagcgactaactggaatcttgggaataaggatggttatcagcaacgcgcaaaaacacctgccttcccggcgggaaatagctggcatgacgtaagactggataatcaccaacatattgataaggctcttcctggaagaatagaacgtcgctgccgtgacgttatgcggataatgctacctctggtgaaggagttggcgaaggcgtcttgatgggtttgaaaatgggagctgggagttctaccgcagaggcgggggaactccaagtgatatccatcatcgcatccagtgcgcccggtttatccccgctgatgcggggaacaccagcgtcaggcgtgaaatctcaccgtcgttgccggtttatccctgctggcgcggggaactctcggttcaggcgttgcaaacctggctaccgggcggtttatccccgctaacgcggggaactcgtagtccatcattccacctatgtctgaactcccggtttatccccgctggcgcggggaactcccgggggataatgtttacggtcatgcgccccccggtttatccccgctggcgcggggaactctgggcggcttgccttgcagccagctccagcagcggtttatccccgctggcgcggggaactcaagctggctggcaatctctttcggggtgagtccggtttatccccgctggcgcggggaactctagtttccgtatctccggatttataaagctgacggtttatccccgctggcgcggggaactcgcaggcggcgacgcgcagggtatgcgcgattcgcggtttatccccgctggcgcggggaactcgcgaccgctcagaaattccagacccgatccaaacggtttatccccgctggcgcggggaactctcaacattatcaattacaaccgacagggagcccggtttatccccgctggcgcggggaactcagcgtgttcggcatcacctttggcttcggctgcggtttatccccgctggcgcggggaactctgcgtgagcgtatcgccgcgcgtctgcgaaagcggtttatccccgctggcgcggggaactctctaaaagtatacatttgttcttaaagcattttttcccataaaaacaacccaccaaccttaatgtaacatttccttattattaaagatcagctaattctttgttttcaaacaggtaaaaaagacaccaaccttaaaccatccaaatctaccggggtacgcctgtttaacccaaatgtctggaactcaaatcccgtttccgtattcgttgcccatgccatcactacattgccttcttccgccagtccagctatttgttcccagatcatttcacgaatttttgcggatacatcacctacatatacccctgcacgtacctccaacaaccagatggctaatctgcctcgtaagcgcggaggtacattttcagtgaccacgaccaacatactcatttcagctactccgatggcctgcatctcccagactaacaggaagcggaatggcaacaggctgtgcatcttcaggtggggccggcggttgtatttctccagcggcaagcacgtcctctataagcggaatcaatttggctaatgttttactactgcgaaaaatatccctgcacgccaaacggacttcccggtccggctcaccagggttacgacgcgctatctcaaaagctttcggtacaacagtgtcaaatttaatgatgtctgcaatatcgtaaacaaaggaaagaggctttcctgtatgcacaaacccaatagctggtgcataaccagctgcaagtatcgccgcttcagttacgccgtataaacaggaagttgcagcgctaatgcattggttgatcgtatcgcccttttcccagtctttcggatcgtagcgacgtccattccatgtcacgccgtattgcttcgccagaagtgcgtaggttgcccgcacgcgactgccttctatacctctgagttgctctacggagcgccgggcaggcgcaggttctccaaaccgaagttcaaacattttacgtacgaccttcagacgcaaatcttcatccagagcaagttttgcctgatagagcagcttatcactacgcgcacctccaggctgaccagaagcataaacacgaacgcccgcttcccccacccataccaacaatgttccaacttgcgcagccaggcgtacagctgcatggctaacccgtgtaccaggttccagcatgatgcaggcaacgctgccaacaggaatatgagtgcggatccctgtcttgtcgataagtacaaacgcgccatctattacatcgatctgcccatattgcagaaagatcatggagacgcgatctttgagtggaatgggattaaggggaagccaggtcattttattacacctcaatcacagtggagccaaagatagcaagccacatcccatgcttttagctggcccaataccttgctgtacaagatctattaacgctggcgcgtcgttgatggtgagcacaccttcaaagcaaaccgtttggatctttccacttttaccatcaccagaaaaatactgtggccgttcgcttatgggatgcacatcttcaacgcgcgccgcattgcccaatttacgttgcaaccacgcgatttgttctgcttcttttattaacggaacccgacagcgtttaatattccctttactgtccaggcgcttttgattgtcgagaatagttttgatcggatttgcccgaagccgaaaatagagtggaacaccaacctgaagttgaaattcaacctgtttagttttaatgactgtcgcaacggcagtactaacaggcatttgcgcactctgcaataaaacatgacagccttctggtgtgtttcgcttctcaacatgaaaaagaaaatcacgagcagcatccggtctgtttggaaataaatgccataatccctggtgaagttggtaaagatccctgctccaggccctggcaatgatgactttactgagatacatccatacctcctttaatcacataccattctcgggaagcaaattgtcgaggcaaggtgatcatcggttcgtcgcgcgccgtaaattttaaatgatgccctgtaacactttcctcactatatatatcgccgccaacgggctcataatttaatagcgccttctgaggatcgcttgcctgacatgtccccaaaaaaagcgggtgtgttagtgggcaacttctccgccccaggtaaggtgtataccgaggctttaatactgctttttcaagttcactgataaccatcgttgcatggggtgttaaccagagagcgacggtaaaggaggcatcacataaatattcgcgccatgtttgaatcgtttcatgacttttcaaaccacggtaatcttctcgcgctccaaggactgtatggtaatcacgcaaccccgttacagacacacgacgatcgtcaagaatgagttcatcgcagcgcactgcaaattgcacactctcacttaacgcctgtaaactagaagtatcatcacgttggatcccaagacaagccccgagtagccctaataacccgcttcgggtcggaaatcttccggtaggtcgcgttccttcaaaggtcggctgcccccaggcttgcattggcccagcaagccgcaagatcaaataagatctcatgttcacgcctcgccattattacgaacccaggattttaactgttctaaagtaggcatttgtttaacttgagcagtaattgggtctacatcagataagctgaattgcgcagcagctccgttcagaccatatccattggcaacgcgatcccaatattgattaaacgcctgtatagacggttgcaaaaagccatctttcgctttaaccgctttttcaaaagcatttgccatagaaagtggcatatcggagaaattaaccattaccatatccgcagggttaaaagcggcataagtacgctgttttgctccagggacctctgttgccagcatatgaacaacatgggttgcaatttccagagcctgctccctggaggcaccacctaaattttcctgaagttgagcgaggttaatgttggcataacgataaaaaacaccgctactaaattcctgagttcccagatgtgcagaaccttgttcctgtaaatcatctacagcggtgaaccagtcaatatcagaatcaacctgatgagtagtgatcgcatgcgcaatggacattgcaccatcaacttttcccaactcagtcatcatgccgctggttgccattcttccactaagcgcaatatcaacaccctgctgtaaattcacacgtatggcggcaatatcttccttaagaactttgagcagctttttatcatccagattatcagcctctgcttttgcaacctgctcacagaaccaggctatttctcccacaacccagggagtaaccgcatcggcagaaatcttttcggcttcatcaacacttttaccggagagcagcgctaatgtcttatcgatgattttttggtcaaaacgttcaccaagtttttgccgaagaacatcacgtaattgtgcaagatgaatggttctgagactggattcaccaatattttgtgcgtaataaccacttttacgcatcgcacgtttaaggctttgactactaattcttactcgtcttttgccgccgaaaatagcgtctttctgcatgttcatatcgtcgcggttcagacaactagggctgtgagagatcagaacatgaatattgataaagttagacatagaaaggtttccttacgcatttttgtttgtggtcaatacaaaatcttccagaagttgctggcgttcgcgctttccccaccaggtcaacatcctggccattaatggccagtcaagtacgggttcggcgtgagtaagtaatcgacgtaactggaccatatcggctgttctgtcagcccgaattaattgaaagatacggcgctcgttaattcttccactattggctaaagctcttcccaagctgatacctgttgtttgctcgctttttttgtcctgatgtcggatgacattctttcctgcgctcaggcaaaacaccatgcgcaaaagagcctgctggtgacgtgggttttcccaaccaaaaggttgcaccagcctataaaacgcagggatatcgcgtaattcatcaggttcactaacacgtctaatttgcgcacaacttccattatccagttgttgccaggctcgatataaagccattgcatcaatttcatcagccattacttggccctccttgcggttttaactcccgtaaatgtttgtatagcgtggcgcgggcaagcgctaatgtgcttattaatttaggatgatgtgcatagggagctacagattgattaaatagcatttcacacaattgatgaagtttgtctcgtaaatcagctattacctcatcagcctgggaaaaattaacattcgccagtacatcgggaattaataattcactctgtcgatagaaatgcctttctgcagtctcatgaacagagactccggcccctttgaagtctttatttttaaacccttctgcaaaggtatataacgccttgcgtaaggctgttttatatcccaaaccaacagtcactatttcgtttatcacattgccgtattgttgccacccctgattaaacatcaacacatcatgacgccgttcaagaatagatgcttgattattacgatatccccccataatcaattcaagaggactttgcggcgcaatatttctgaattgattcacaaccgccgccacgcgatttccattttcattttgaataatcttatctaccacaactcggctgatttgtgtccaacttggtgcggaggtggtgaaagcaagaaatttttcctcaacctcccctttcttgactgttaccagacaaggggaatgcggatggggccatagcccattaactgtaaaggtaaatttttccttaagaaaaccggtataacgcaaattgctttcctgtccacagcaagaacatttaccaatcccaatgggatcgcataattcaatatgcgctggttgccagaatagaccacggacaaacccaatactgctagcaggtatagactcattggacttgataggtttaatccaggtaggttggttttccgtatgactttcattaggaaattgtttttgaagacgaggtaatgtgaggacattgagtaacaccgtactacgaagatcgatcccacgtacgaacgttgttacaggtgttcctccacgtaaaccgcttttaaaaccaccaccaaaacctggtgcctgattcgcctggttgaataacgcaatcgcagtgcatccaccacataatgcttcaccctgccccggttgattgacaaatgcacaattcgtcgcgccgcttaccccagccaacagtttttccattggagtcacatcatttgctttgacacctttggtctgcataaagggatgttctgcgtgattaaggtagaacatatctatccacggcgcgatgagttgttgaaactcatcttcagtgagcggattcattatgcgatgtcgaaattcaacgtcatcttttgccggggcgataatttgcccaatgcaaaccagcagtgctaaagcggccagttccatatcgtcacggggcaaacttaatcgccactgatctctactgcagtataggctttgcagatttatgatttggactttccccccgtttcgcgggcgtacagggatccagttatcaataagcaaattcatttgttctccttcatatgctccgacatttctcctgcatttctatacgtcggcacacttccgttatcggtaaaaacaaagaaaaaatacggcgtaattaattcaataatcacattcactgcaaaaatatattcattggtttaatacaattaacctatacatatattaagatgtgttgaattgtttaaagacaataatgcatgcatttcaaatctgcaagttattcgttttattattaaagaaacttttagttataataattaccatgaattttattacataaaatattcatactgtgaatataaaatctcataccgggaaattaaaagaagatgtacattgtgcaccttccctacttaagtagggataaaccgttattggtcttattatcgtcattgataacaatcattcccgaagttatttgggatttgcagggatgactctggtcatcccttcatcccctgtataggtaataacaatactgttaccctgccagacccatccatccagattctgtttcccttccagccaaagtaacccatcttcatctactacttcagaaaaactacgtttccaggtgaagggtacattgacgcgattaagtgcaagcgcctcatactgctgttcatgacttaggtcctcgtagacctggccatcgagcagttgtttaccactagacgtttgtacataaggcaataatggcaggctcatttccccatccctcgttaccgcaagaatggtttcatcgttatcctgcaagctatattcttcagcccactgcaggaccttgcgagccttgaaccttttttcacactcggcgctttcaaatttatccatgccattgccgacccattctggctcatccatttccgcatcatcgtaaatgctatccagccattgccggtaagcatcagggaaaaataaggatgctccattaagctcctcaatatgttgctgcgtccgccacatgactctaacgttgctataaatatgctcatgtcgtccgtaaccctcgccatcaggcagcaaaatggtggcaacaggaatctcaaaaccagcgggacgatatttgcgatgatggcgatgtaaacggcccaatcgttggaaaagcaaatctgcaggacaatgctgagtaattaaccaatcaaaatcaacgtcgagactttgttccacgacctgggttgcgacaagtatccgtccaacatttcgcttcccatttttgccgaaattgctaataactcgattctctttttcacgacgatcgttcagcgtaaagcgcgcatgaaacaaatctatatctacttgcgtgttatttagctcctttagccgttggtagcatacttgtgcaacgtcaaccaaattgcaaataagacagacctgtgcacccgcgtttgccgctgcgatcattcgctctaacatcgtaaggtcaggtaacatgtcagctaaacaaataggttctggctgaatgctaaagcggggcgggagttgttctggatgagctagcagatcaaaacgttgcgcaccattcacacctcgccagttaatgagtggatatgcggagttattttccactggatctgtatgcagaccataagtatccagaagtttctgtttttgtttcattggtagggttgcggaaagaagaataacactccctcccacatcagcctgagccttgagcactgcctccagcaagccgttcatataggtgtcgtaagcatgaacttcatcaacaattaaaacacttcgaccaattcccaaaccacggataaagcggtgtttaactggcaatacgcttatcaacacctgatcaatcgtgcaaacgccgatttgcccaagaaacactttcttattgctttgactcaaccactgacaacactgaacccacgcttcttcttgcccctgttcagtaatcgcgcgactttttatactttgaaagaggtggttaaaccgactattgccatgagcaagaataagatttggggaactaaataagtggctcgcgctcgcttccattctcgtaagcatagcattcgcggtagcttgtgttgggagggcaaaaataacactatccgcaatttgttgatcaataagtttccaagcataggccagcgctgtttccgttttaccggagcctgtaggtgcctctattaccgtcagcccgggagctactggaagagcatcaactaacacctgtaattgtctgggttgatagccattgtccagtagtgcatgaacaccttcataacatcgcttattacttacaagtccactcaactccaatacccggctcgcatcctgctgtcggtcctggaaatacgttctcagagcatttatgtcggaaggcgcatcctcattaaacagaaaggtattcgttgtagtccaggagcctaaccagtcagcaaggctgcaaaaacctgctaacagactactacaatcaggtggtatatcgtttatagataaccccgctggcgttaaaaataatgcttccagtacagatatccactcctcacgagcctgtttatcttgcgcagcataagatgccagagaagctggcatttcccaacggctcttatcttgatcctgggaatgtaatataaaaccatgatgtcctgtaacggcctctacccatggaaaccaggactcataaggatgaggagcggcatcaaaaaaactgaaaaaatccccgagagattgctcactaagactatcctggttaaaccaatacagaccggctgcaccatgattaaatttacggcacatttgtgtacttggaccattaagacttggcgttgcaggatttaatttcagccaactttctgcacttttatattggaatcgtatatcaaactttccaatatcatgaagagcaatgaaaaataacagccaggccttcaccctctgtttacttagcatttcatttcggcaaaaagtattttgcagtacgacactttgatcccaccagcaatctgcaacagcagcaacatcaaggcaatgataaattaacagatgaatatcatttcctttcgtcaagcttttactggattttccccagtaatggcatatatatttaaaaggttccattaatagcctccctgtttttttagtattatcgatgatatcagcgggctatttttcgatgctgctcataaatatcgaattacagtgatatacacatgtcttgcctccctgcaaagaagagactaacattcgaattgtttgggttcgaacgctggcctcaggttgatagaaatatcgcctggggcttttgtccatctggaacctcgcgaatgcttaacgccagacagcctcaagcacccgacgccattctatacctgataattcttcccgcggcgttcacgtttaaaatcaggaatgctgctcgcaaaataaaaacgcccccatcatttctgacagaggcgtttaatttgtccggcaatatttacccttcgtgtaacccacattccctttttaagccaaagaaacgcgtttcttcttccgccatgccgggttcccatttacgggttgtatgggtatcgcccacgcttaaatatccttcatcccataatgggtgatatttcaggccatgtttttgcaggtactgataaatagttcggttatcccagtcgataatcggcagcactttaaatacgccacgctgaattgccagcaccggtaaattggcacgactgccggattgttcacggcgcaggccagcaaaccaggtttgcgcattcagttctttcagagcccggttcatcggttcgactttgttgatgtcattgtacttttcaatgccttcaacgccctgctcccacagttttccgtagcgtgcttcctgccaggctgcgctttcggtagcacggtacactttcaggttgagcttgagtttgtccgttaactcgtcaataaagcggtaggtttccgggaacaagtaacccgtatcggtgaggatcaccggaatatccgggcgaatttgattcaccagatgcaggctcaccgccgcctgaatgccaaagctggaagaaagtacatattcaccgggcagattatccagcgcccaggctacgcggccttcagcgtccagtttttccagttcggcgttagtttccgccagcgccagaatgcgatctaccttcggcagttcgttcagggcgtttagatcgagtttggacatagattcctcactgtttgccttgcctgatgcgacgctcacgcgttcttatcaggcctacaagaccgggctgatggttaatcccacaaatcacgcgccggatcgagcaccgggcgaatgatgcccgcacgcaccgtaaagtcgccgaagccttcacccgcttcgcgctctttcgcccagcgccctatcagttcatcaaggctcgccaggatttccggctcggtgatgttttctttatacatccgtgggatacgtgtcccaatgcggttgccgccaagatgcaggttgtagcgacccggcgctttacccaccaggcccacttccgccagcatcgcgcgaccacaaccgttcgggcagcctgttacacgcatcacgatatgctcatcgctgacaccatgtttcgccattaaattatcgatgttgtcgataaaagacggcaggaaacgctctgcttccgccatcgccagcgggcaagtcgggaaactcacgcaagccatgctgttttcacgctgcggcgtgacggcattcattaacccgctctctttggcgatcttctcgatcttcgctttctcgctttccggtacaccggcgatgatcagattctggttcgccgtaatgcggaaatcgcctttgtggatcttcgcgatctccagcaggccggttttcagcggacgcgccggataatcaaggatgcgaccattttcgataaacagcgtcaggtgccagttatcatcaatgcccttaacccagccaatacgatcgcctcgtccggtgaactcatatggacggatcggttcaaatttgatccccgcgcgacgctccacttccgctttaaacgtctcaacccccacgcgctccagcgtgtatttggttttggcatttttacgatcggttcggttaccccagtcacgctgagttgtcacgacggcttcggccaccgccagcgtatgctccagcggcagatagccaaactcactcgcggtgcgggcgtaggttttcttgttgccgtgttcgatggaaagcccaccgcccaccaacaggttaaagcccaccagcttgccgttttcggcgatcgccacgaagttcatgtcgttggcgtgcagatcgatatcgttctgtggcgggatcactaccgtggttttgaatttacgcggcaggtaggtctggccgaggatcggttcttcatcagtagtggcgactttttcctggtcgagccagatctccgcatacgcgcgggtacgaggcaacagatgctcagaaatcttcttcgcccactcgtacgcttccgcgtgcagctggctctcgtaagggttgctggtgcagagtacgttacggttcatgtcgttagctgtcgccagcgcatcaagaccgacgctgtgcagcatctggtgcaccggtttgacgttctttttcagaatgccgtggaactgaaacgtctggcggttggtcaggcgaatgctgccatagatggtgttttcaccggcaaatttgtcgatcgcctgccactgtttagtggtaatcaccccacccggcagacgacagcgaagcagcatcgcgtggcgcggctccagcttctgttcagcacgttcggcgcggatgtcgcggtcatcctgctgatacatgccgtggaagcgaatcagcaggaagttgtcgcccttaaagccgccggtcagaccgtcgtttaaatcttccgcaatggtgccgcgcaggtagttgctttcatgcttcatgcgctcggcgtctgtcagttttccttcgaccactaaaggccctggatgtttttcgctcattagtagacatctcgctgataacggcgctctacgcgcagctcacttaaaaattcatccgccgcttcggtgtccatgccaccaaattcggcaatcacttccagaagtgcctgctcaacgtctttcgccatgcgattagcgtcgccgcagacataaatgtgggcaccatcattgatccagcgccacagctccgcgccctgttcgcgcagtttgtcttgtacgtaaactttttctttttgatcgcggctccaggcaagatcgatacgtgtcagcacgccatctttgacgtagcgctgccactccacctggtacaggaagtcttccgtaaagtgcggattaccaaagaacagccagtttttacctggcgcttcgtcggcggcgcgttgctgcataaaggcgcggaacggcgcaataccggtgcctgggccaatcataatcaccggggtttctggattggctggcaggcggaagttatcgttatgttcgataaatacgcggacttcgccctcttcttccacgcggtcagcgaggaagctggaggcaccaccggcacgggcgcggccttccacgtcgtaacgcaccacaccaacggtgacgtgtacttcgttctcgacttccgcctggctggaggcgatggaatacagacgcggcgtcagcgggcgcagcagattaattagcgcttcggcatcaagctgtgccggggagaaacgcaccatgtcaacaatcggcgtcgtcgcggcgtaatgctgtaacttcgctttatcgcccaccagcggcagcagtgtttcactgcgggtaagcgtggcgtaattctcaacaatgttggcggtgttgacggtcagttcgaagtgccactgtagcgcttcgttcagaggcaacgttttgccctcgacggtgacaggttcatcgcctttcagccacagcagttcgacaagttctttcaccagtgccggatcgttctgataccagacgcccagcgcgtcacccggctggtaacgcatgccgctgtcacctaagtcaatttcgatatggcgaacgtctttttcagagttacgcccggtaattttctggttaacagagaggctagccaccagcggcgcgtctttgctgtacgggctggtgtggatttcatttaccgcgccagtagcgacggattggctaggtgccgcgacaggcgcacggcttttaagcgcatcaaccacgcgggcgcgccactcgctggcagcagcctggtattcaacatcggcatcgacacggtcgagcaggcgttcaccacccagttccgccagcttgctgtcgaaatctttcccggactggcagaaaaattcataagagctatcgccgaggctaaacacggcaaacgcggtgttttccagctttggcgcttttttggagaacaggaacttatgcagcgcgacggcttcttccggcggttccccttccccttgcgtactcgtcactacgatgagcagtttttcgctggcgatttgtttgaatttatagtcgcccgcgttcaccagcttaacgttcagttttgctgctaataaatcatcacgtaatgcttcagcaacccggcgcgcattgccggtttggctggcggagataatagttatacccggcatttctgcggctggcgctggcgtcgctgcaagcgcagcaggctgctgattgagtacgccccagaaatagccagaaacccaggcaagctgggtgggagttaaatcggtcgtggccgcctgaaggcgtgccagttgctccgggttcaacggaagcaacgcggaaggtgggacctgtgtcgtcatgcgtcgttatgttccagtaagcaaagctgtttctgcgccctgtcagcgcccataaaacagaagagaaggtaaggttaacggggcaaacggtgtggattaaagacgggatagcgataactaataaccaaatcgactaacctgttttagcaatagtctttaacaacaaaatagattaaccaacctaatgaaaaacaaatgaatttagccaatcattaagataaatcagcgattttgcgcaacaaagtcgttttagataatgcgaaaaaacagcctttccggtactctacggcggttttatcgtcctgtagagaaattatgatgtccaccacgttatttaaagatttcaccttcgaagccgctcaccgcttaccacacgtcccggaagggcataaatgtggtcgcctgcacgggcattcctttatggtgcgactggaaattaccggggaagtcgatccgcatacgggctggattatcgatttcgctgaactaaaagcggcgtttaaaccaacctacgagcgcctcgatcaccattatctcaatgatattccaggtctggaaaacccaaccagcgaggttttagcaaaatggatttgggatcaggttaaacccgttgtgccgctgttaagtgcggtgatggtaaaagaaacctgcaccgcaggttgtatctatcgcggcgaatgataagagtgtgtcggcggtcaatttcccttaagtaacgctatgttagggtgttgtgttctggatatctggggcatgacatggaagacgactgcgacattattattattggtgccggtattgcaggcaccgcttgcgcgttacgctgcgcgcgagcgggtttatccgttttgttactggaacgcgctgaaatccccggcagcaaaaatctttccggcgggcggttatatacccatgcactcgcggaactcctcccgcaatttcatctgaccgcgcctcttgaacgacgcatcactcacgaaagcctttccctgttaacgcccgatggcgtaacgacgttttccagcttacagcccggcggtgaatcctggagtgtattacgtgcacgattcgatccgtggctggttgccgaagccgaaaaagaaggtgtcgaatgcatccccggagcgacggtggatgcactgtatgaagaaaacggcagagtctgtggcgttatttgtggtgacgatattctccgcgcccgttatgtggtgctggcagaaggtgccaacagcgtcctggctgaacgtcacgggttagtgactcgtcctgctggcgaagcgatggcgttggggatcaaagaagtgctgagcctggaaacatccgctattgaagaacgttttcatctggagaataacgaaggcgcagcgttgctgttcagcggcaggatctgtgatgacttacccggcggcgcatttctttatactaatcaacaaacgctcagcttagggattgtttgcccgctctcttcccttacgcaaagtcgtgttccggcaagcgagctgctgactcgctttaaagcgcatccggcagtgcgcccgcttatcaaaaacacggaaagtctggagtatggtgcgcatctggtgccagaaggtggcttgcacagtatgccggtgcaatacgccggtaacggctggctgctggtgggcgatgcgttgcgcagttgcgtcaataccggaatttccgtgcgcggcatggatatggcgctgactggcgcgcaggcggcggcacaaacgctgataagcgcctgccagcaccgcgagccgcaaaatctgtttccgctttatcatcacaacgtagagcgcagcctgctgtgggatgttctacagcgttatcagcatgttccggcgcttttgcaacgcccgggatggtaccgtacgtggcctgcgttaatgcaggatatttcccgcgatttatgggatcagggtgataaacctgttccaccgctgcgccagttattctggcatcatttacgtcgtcacggcctgtggcatctggcgggcgatgttatcaggagtctgcgatgtctgtaacgtaagatgttatcaggagtctgcgatgtctgtagcccgtaatctctggcgcgttgctgatgcgccgcacattgttccggctgactccgttgagcgccagacggcagaacggttgattaacgcctgtccggcaggtctttttagcctcacaccggaaggtaacttacgtattgactatcgcagttgcctggagtgtggcacctgccgtttgctgtgcgacgaaagtacactacaacagtggcgctatccgccttccggattcggcatcacctaccgctttggataaataataaggataatttatgcccctcttacacctgctccgccagaatccggtgattgctgccgttaaagataatgccagcctgcaactggcaatcgattctgaatgccaatttatttccgtgttgtacggcaatatctgcaccatcagtaatatcgttaaaaagattaagaacgccgggaaatatgcttttattcatgttgatttgctggaaggcgcgagtaataaagaagtcgttattcagtttttgaaactggtgaccgaggcggacggcattatcagtaccaaagccagtatgttgaaagcggcaagagcggaaggttttttctgtattcatcgcctgtttattgttgatagtattagctttcacaacattgataagcaagttgcgcaaagcaatccggattgtattgagatcctgccaggctgtatgcccaaagtgctgggctgggtgacagagaaaatccgccaaccgctgattgccggtgggctggtgtgcgatgaagaagatgcgcgtaatgcgattaacgcgggtgtcgtggcgctttccaccacgaataccggggtctggacgttagcgaaaaaattactttgacgggataatcgtaaccaattgaatttggtttgatttgtaggccgcacgccacatccgacattcagcgcctgatgcgacgcttgacgcgtcttatcaggcctacaagtccccaggccagaaccgtaggcaggatcatccggcaacacgttattggcaatctgcgtgaatgtttgtcaccagtgcctccagcaccactttccagtcatcaaccacgccaacatctgcctgactaaataccgcagcgctggcgtcatgattaatcgccaccacaaacttgctattgcgtacgcccgccattaacgctgctgcgccagaagcgccaacaacaatacacacctcaggtgccagcagatgtccggaaataccaatcactttttcagcatcaacgccaccgttcatcactcgcgcccgactgtagcccacttcggctcccagcttttctgccagcatagcgatttcctggttatctgcctctccgccctgccccaccaccagcacccgtctggcctcagctaatgggtcgcgggtaacatttttcagatcctctgtgctaaccagccagtccggaagcgcacccgggacaatgttcagttgttgcattccagagggcaacgtggcgtttttcgctgctcccgcctgacgcgccagggaaaggcatagcgggcgtttttctgtttgcagcgtcgccgttagcgcatttccccagtgggatttgcgcacgcttacggttggaatatctaagctagtcacctggcagatgcttgcaccatgtaaacgccaggccagccgggtgctcagttcatcgccaaacgttcccggcggaaagagaacaacgtccgcaggcgttcgctgccactgttccaccaacgcatccagcacctgttccgccactacaggctgaggttcaatctgccagtgcgccagggtacaaccgctgaaatcctgcgccgccagccagcttgctattgcggcattctcctgatttattgtcacaattgcgatattcatggctgcatcctttggcgtaaatagtcctgccatagcttttgagctttttctgctaccgtttgcccatcaatcagcgtcgctccgcgtcgttgctctgctcttgccagttgcagacactgcatcgctggcatttcggcagcaacagttttacggataatttctgctttccccgcagccattcgctggcgcattcccggtactggcaaggccacttcaccgcactgacgcacggcaatcaccgcaggcaagcgaacccggcaacaacgcaacccatgttcagtacgctgttcgagggtgataaacagcgcgtcgagagtgaaacgctccacctgggtgaagcagggccagcccagcatttccgccagcaaaaatggcgtttgcccattctgcccttcgctgctttggcagccggtaattatcagatccagcggattctgatgctgccattcggcaatatggcgagcgacaaattccggcgcaaagcgcagatctgccgccgtctccagcaatacagcttcctcaaacccaagagccatgagatagcgcagccagtgcaatgcccgttcatcccccatgctcaacgcggttaaagacatcggcgtaccgttttttctctgcgccaacagcagcgcggcagcggcctgttcatcagcaccgagtaaacttcgcagtaggctaatatccggtccgcttttaccctgagccgccgcctgccactctttttccgccagcattccggcatccggttcggctttaaacgctaacagaatgttcattcgcacctcctacatttcccgccgccaccagcgggagggctttagtttctggtgcccatagccaggtcacaacaaaaccaaccaacaacactgtcgccaggagcaataaggtgacttgcattccccactgcgccagcacccacggcagcaggccagtacttaccgccgcgccaagtcgactcatggcagtggcaaaaccgacgcccaggctgcgaatgtcagtaggaaaactttccgcaggcaaaatgcccaccagattactgactgcgctaatggtggtgctgaagagaacaaaaagcagcagcgttaaactactgccggaaggcaaacaggccatgactaccagcgttgccgccagcagcaaaaaacttcccagcaaaaatttgcgatgtgccagcaggtgcgtcagaactaatcccagcagcgcgcccacaattaacaacgcattaagcatcaggctggcagtcagcgcatcttccagaccaatagtctgggcgatagttggcagccaggtataaatcacaaaccatgggattacgaggcagacaaagaagacgctgttaaacgccgtgcgccgccagtaacggctagagaacaaggttttgatgtgtttatgggtcgccgttaccacttcatcgcccagtaaaacatggggaccaaaatagcgatgcacgatagcgtgagcttctgcaaaacgcccctggcgcagtagccagcgtggactttctggcgttccccagcgtaataacgtaatcaacaacgcgggcagagctgcgcttgccagtagccagcgccaggcctccgggttttcggaaataaagtgatgtccggcaatacttgccagcacatagcctacggtccacaccacgctgaatgcgcccagcaaaataccgcgatggcggcgcggggaaaattcagccagcaaggtgtgacctacactataatcgcctcccagaccaatgccaatcaaaatgcgcagtccaataagatgctctggcgtggtggcaaaaaattgtaaaaagctagcaagcgtaatcagcaaaaagctgaaggtgaagattttttgccgaccaatatggtcggagatccacccaagaaccaggctgccaaggaacaaaccaaggagcgcgctgccgccgatcattcccgccataaacggcgtcagttgcatggcgggcgtaagctgaataatggcgtaaccaatgacgccgagaacataaccgtcggtcaggtgtgcgccgaaagtgagcgcagcaatgcggcagtgaaaacggttaagcggtaaatcatccattcgcaccggactagtgttcatctttaccccttcattgtccggtaataagaacggcttctcgcctgagaagccgaaaaggcaacgccccgtcatcgcggaacgctgcctgacacattatttttcaatcggatagatagtacccgtattcataatgccattaggatcgaactgctttttcagcccttccagcaacgcccacgcgctgccgtgttccagtttgctccagtgaacgcgatgtttaccgataccgtggtggtgcaccatgctaccgccgaggcgaatggtttcttcacagatgatcttgttgagcggattgtggtacttgtcgatttcctcttccggcttacagtcaacgacgttgtaatcgtagacgaagtacatgttggtgccgttctgatagctatgagaggaatgaccgcccagcatggtgatgtcgtcggcgtgcgggaactcagtacgaatacggttaataacgctttcgtagatttcgtggatgcagctccagcagccggatacttcggtggtaaagcccatgttgccggttttgaggatctgcacacgttcggcagccactttatccggtccccagttcaggttgttaaaccaggtttcgatcagcttgctgtccacgcgctggcattgcgggtagcgggcaacgatttccgcaatcccttcgcccgtcaccttcgcaatgcgagggttaccttcagccataaagatcagcacgcattttccgtcggcaaaatgggtgaagtgttgggtgccatcttcagcgtcatacaaacgagcgatactcggacgatacccttccaccatgatttcacgcaggatgttgaagccggttttcatgtcttccaggatatagccgtagaagaggttgttttccggggtgaatttaaagattttcactgttacttcagtgatatagcacaatgcaccttcgttgccgatgatgatgtgacgaatgtccgggccagccgcgcggcgtggcacgtttttaatgcgtgtgacggtgccatcagccaatactgcttccagaccaacgaccatatcttcgattgcgccgtagagtgtggagaactgcccgatacttcgggttgctaccaggccgcccatctgcgccagcggcttactctgcggagaatgccccgtggtgtaacctttttcacgcaacgcgttttccagcacttccagcggaacaccacattgcgccgtcgcctgcatattctcaatatcaatattaatgatttgattcatggcggagccgtcgagcaccacgctgttttctacaacagtttccagcccaccttcggtggcggaagcaccggtacgcggcacaccgttaattttgtgcgcattcataaaattcagcacacgggatacttgctctgtggaaccgagttttacgaccgctgccggaatcggcaaagtataaatgccatgaatatccggaaatttacgaaaacggtcaatactgtttttctttaatactgtttcatcggtaattacgcgatctgcaccaacaatttcctttagctggtcgacaatcgctgcgcgagataaagacatagtaattccttcctgataataaaaatggaataatcattaataagagaaaacagaaaccaccgttatgggttagcgcactaaataaccgccatcaaccactaataaatgcccgttgacataattgcttgccggacttgcgaggaatacggctgcgcccattaaatcctgagtatcgccccaacggtttgccggaatatgatcaagaacgcgctgattggtttctggattactgcgtgtcgccagcgtaatatctgttgcataatagccaggggcgataccatttacctgaatattatattgacctagttcatcacaataagctttggtgaacccggcaagagcatgtttagtggcagaatatgcaggactccattgtccacctaagtaagagaacaaactacagatattaataattttgccgcttttctgcgggatcataatttttgcagcttcatagcttaactcgaatgcggcggtcaggttcacatcaatcatcggatcccagtcggcacgaccgaagtccagcaccttattcagcttacaaataccggcattgttaaccagaatatcaactgtaccgaaacgctcacagcaagcagcgataatcttctgcggcgcgccttctgcggtgatacccacctgcatgaagtccacctcaacaccctgtttttcaatcatttcctttgtttcgccgttatctttgacgaaactaggaataaagatatttgcgccagctttggccaacgccatggcaaatgcctggcctaaaccgctattcccaccggtaacaattgcggttttacctttcagggagaaaaaatccatactgaacgcattgagagattcgatactcatagttagctccaatttccgtaaggcaaaaaaaaagaaaggtaacttcccccgcgagagggaagttacctttctcattatctctggtaactggagataatttttagcataagggcataactgctaatgtgatcgtaatcacagtgtgatattcgtattgtcaaataattttaaaaagcagaagcgtgattactctcacacaacacctctgctttccatgttatttattatttcaattactagagacctgagaaaagtaatccacctgaaagggcggcttacttttctcttttttttgtctattacaaatgggaatacgatatgcaacacaacagttatcgccgttggataaccctcgcgataattagttttagcggcggcgttagtttcgacctggcttatttacgttatatttatcaaattcccatggcgaaatttatgggattcagcaataccgagataggtttaataatgagtacctttggtattgcggccattattctttatgcccccagcggcgttattgccgataaatttagtcaccgcaaaatgattacttccgcgatgatcattaccggattactgggtctgttaatggcaacgtatccaccgctgtgggtaatgctctgtattcagatcgcctttgcgataacgacgattttaatgctgtggagcgtgagcattaaagctgcaagcttgcttggcgatcatagcgagcaagggaaaattatgggctggatggaagggctgcgcggcgtcggtgtaatgagcctggcggtgtttaccatgtgggtcttttctcgctttgcaccggatgacagcaccagcctgaaaacggtcattatcatctatagtgtggtttacatcttgttggggattctgtgctggttttttgttagcgataacaacaacctgcgcagtgccaataacgaagaaaaacagagtttccagcttagcgacatcctggccgttttgcgtatcagcaccacctggtattgcagcatggtgatttttggcgtcttcaccatctacgccattctgagttactccaccaactatctgaccgaaatgtatggcatgagcctggtggcggcgagctacatggggattgtgatcaacaaaatattccgcgcgctgtgcggcccacttggcggcataatcaccacctacagcaaagtgaaatcccctacccgcgtgatccaaatcctttccgtactcggcctgctgacgttaactgccctgctcgtcacgaactctaacccgcaaagcgtcgcgatggggattggcctgattttactgctgggattcacctgttacgccagtcgcgggctgtactgggcctgccctggcgaagcgagaacaccgtcttacattatgggcaccacggtaggtatttgtagcgtgattggattcctgccggatgtcttcgtttacccaattatcggccactggcaagacaccctgcccgctgcagaagcctaccgcaatatgtggctgatgggcatggcggcgcttggcatggtgattgtctttacctttttgctgttccaaaaaattcgtactgctgatagcgcccccgcaatggctagcagcaagtaagccaggaaaattacaggagaaaaatcatgagcaaaaaatacatcatagggattgatggcggaagtcagagcacaaaagtggtgatgtacgatctggaaggtaacgtggtttgcgaaggcaaaggcttattacagccgatgcacacgccagatgccgatactgcagaacatcctgacgacgatttatgggcaagtttatgttttgccggtcacgatttgatgagtcagtttgccgggaataaagaagatattgtcggtattggtctgggatccatccgttgctgccgtgcgttattgaaagccgatggcacgcctgctgcgccgttgattagctggcaggatgcacgcgttacacgcccttacgaacacactaaccctgacgtggcatatgtcacctcttttagcggttatctgacgcatcgcttaaccggcgagtttaaagacaatatcgccaactattttggtcagtggccggtggattataagagctgggcatggagcgaagatgctgcggtaatggataagtttaatatcccccgtcatatgctgtttgatgtgcaaatgcctggcaccgtcctcggacatatcacaccacaagccgcactggcgacacatttcccggcaggactgccggttgtttgtaccaccagtgataaaccggtagaagctctgggggccggattactggatgatgaaacggcggtaatttctcttggcacttacatcgcattgatgatgaacggcaaagcactgccgaaagatccagtagcgtactggccgattatgtcttctattccgcaaacattgctgtatgaaggttacggtattcgcaaaggcatgtggacggtgagctggctgcgcgacatgctaggcgagagcttaattcaggatgccagggcgcaggatcttagtccggaagatttactcaacaaaaaagcttcttgtgtgccgccaggctgtaatggtctgatgacggtgctggactggctgaccaatccgtgggaaccgtacaaacgcgggattatgatcggctttgattccagcatggattacgcatggatatatcgtagcatactggaaagcgtggcgctgacgctgaagaacaattacgacaatatgtgtaatgaaatgaatcactttgcgaagcatgtgatcattactggcggcggtagcaacagcgatctgtttatgcagatttttgccgacgtgttcaaccttccggcacgacgtaacgccattaacggttgtgcaagcctgggggcagcgattaatacagcggtaggtctggggctatacccggattacgcaacggctgtcgataacatggttcgcgtgaaagatatctttataccgattgagagcaatgccaaacgctacgacgcgatgaataaaggcattttcaaagacctaaccaaacatactgatgtgatcctgaaaaaaagctatgaagtgatgcatggggaattggggaatgtggatagcatccagagctggagcaatgcgtaagtgaggaaggccgggcgggaaactgcccggcctgaacatacctgaatggttatccccgctgacgcggggaacataagttcgacaacttaaaaaatgataacaagtccggtttatccccgctgatgcagggaacataataaaaactttaactagttcggtttatccctgtttttacaaggaatattaactacactcgatgtctttagaataaaagacaatacgaatcgcactttatcaattttcacttaaagtatgaactggatatctttattcataagaactattcatcaacagcgtatagaggcggttatgtaaaaccactcattagcctcaaaacaaagacaaacttccagatttattacttaaccaatgaataacaagcttaaaaaatatactgttattctaaagaaaaaattaacaggcattaattcaatattaaaaaaataatagattaaaatttcttaacgatttaagaatcatacaaataacactttgattaaatttaattttttgtatcgataattgtgaacctctctggcatggagaactattttgaacatgaggtgttacgtggatatgttgcttattacaagtactgctaatataaaaacttgagaaagagataacgggttatatggtggtttatccccgctggcgcggggaactcgacagaacggcctcagtagtctcgtcaggctccggtttatccccgctggcgcggggaacacctgttttcgcaaatctatggactattgctattcggtttatccccgctggcgcggggaacacgggcgcacggaatacaaagccgtgtatctgctcggtttatccccgctggcgcggggaacactggctctgcaacagcagcacccatgaccacgtcggtttatccccgctggcgcggggaacacgaaatgctggtgagcgttaatgccgcaaacacaggtttatccccgctggcgcggggaacacattacgcctttttgcgattgcccggtttttgccggtttatccccgctggcgcggggaacactctaaacataacctattattaattaatgattttttaagccagtcacaatctaccaactttatagtatcacacaaacaacacatccattatgttaaagagcacttaatccattgattaaaaaggtaaatatttaaaataactctatacaaactaaaatctaccaaactttaccgcaataattttcactccagcgaaaaattaatgccacagaatttgtagagaatgctaatgattagccctggatgggtaaaatggaggagttttcagaggcgacaaacaatataaatgagtagaagtctttacaggttccacccatttataacgcttataaatgtttaatcaggcaatatttagatatttatgtgtttgcatgctcaaacgccaattacgcgcaatgcaggtttcaatgcacaaacgtgtggcatcatccttttggctaatcggctgcagtgcaatgactcgcggtttatcatcggtcagcgttgccagtagttcatccagtgcttcaatatcgcgtacgcgccccactggatgcttgatttcgttggctcgctccagtgcctgactcaacacttcatagccgccgcgcatgttcagctttgggcttacggtaacccaggtattcggtgtgcagcgtacctcatgagtaccactggtttcgatctggcagctaaaaccgttcttttcgagcagatcagtcagtggcagcaaatcatgaatgcaaggctcaccacccgtaatcaccacatgccgcgcggtgtatccctggcgaccaatgacagccagcaaatcttcactgctcgcagccccccacttatcactctctttggtcttcgccagaatgctgaaaagggagacttcccgatcctcaagcttttcccaggtgtgtttggtgtcgcaccaggcacagccaaccgggcatccctgtaaacgaataaaaatggcgggaacgccggtaaagtaaccctcaccttgcagggtctggaacatctcgttaatcgggtactgcatagcattctctgtgaagtggataattgttaattattgcagatcctgccacaacaatcatgtcttattaacattctgttacaggcaggtttaaagaaaaatgcgaaacatatcgttaataattaaagggagtaacgtattatgtcagaagaaaataaagaaaatggatttaatcatgtcaaaacattcaccaaaattatatttattttttctgtattagtttttaatgataacgaatataaaattaccgatgccgccgtcaatttatttatccagatttaatgagaaatttataatgcgctatttcatactaatgttcactttcgtatgttcctttgttgcagcccaaccaactattgtcccacaattacagcaacaagttacggatcttacgagtagcttaaacagtcaagaaaagaaagaactgacgcacaagttagaatctattttcaataatacccaagtgcaaattgccgtattaattgttcccacaaccaaagacgagacaattgaacaatatgctacaagagtttttgacaattggcgtttaggagatgccaaacgtaatgatgggatactgatcgttgttgcctggagcgatcgcactgtccgcatccaggtaggttatgggctggaagaaaaggtaaccgatgctctggctggagatatcatccgtagcaacatgatacccgcatttaaacaacaaaaattagctaagggattagagctagctataaacgctttgaataaccaactcactagtcaacaccaatatccgactaatcctagtgaaagtgaaagtgcgtcttccagtgatcattattactttgctattttttgggtatttgcagtgatgttcttccctttctggttttttcatcaaggcagtaatttttgtcgcgcatgtaaaagtggagtctgtattagtgcaatctatcttttagatttattcctgttctccgataaaattttttccattgctgtattttccttcttttttactttcaccatatttatggtctttacctgtttatgtgtacttcagaaaagagcatctggtagaagttatcatagtgacaacagcggttccgctggaggcagtgatagcggcggatttagcggcgggggcggttcttctggaggtggcggcgcatccggccgctggtaactcaaccataaaaaatgccagcccggaggctggcatttttaaatcagataaagtcagtcttatgcctggcctttgatctctttacgaccgttgtacggtgctttttcgcccagagcttcttcgatacgaatcagctggttgtatttagcaacacggtcagaacggctcatagaaccagttttgatctggcctgcagcagtaccaacagccaggtcagcgatggtagcgtcttcagtttcgccagaacggtgagagataactgcagtgtagccagcatctttcgccatcttgattgcagccagagtttcggtcagagaaccgatctggttgaatttgatcaggatggagttagcgatacctttttcgataccttctttcaggatcttggtgttggttacgaacaggtcgtcaccaaccagctggattttgtcgcccagaactttggtctggtatgcgaaaccgtcccagtcagattcgtccagaccgtcttcgatagaaacgatcgggtactgtttggtcagttcttccaggaagtgagtgaattcttcagaggtgaacgctttgttgccttcgccagccagaacgtatttaccatctttgtagaattcagaagctgcgcagtccatcgccaaagtgatgtctttgcccagttcataaccagcagctttaacagcttcagcgataacagccagagcttcagcgttggaacccaggttcggcgcatagccaccttcgtcaccaacagcagtgttcatgcctttcgctttcagaacttttgccaggtgatggaaaacttcagaacccatgcggatggcttctttcacagttttcgcgccaaccggctgaatcatgaattcctggatatcaacgttgttgtcagcgtgctcaccaccgttgatgatgttcatcatcggaaccggcatagagtatttgcccggagtaccgttcagttcagcgatgtgctcgtacagcggcatacctttagcagctgcagcagctttggcgttagccagagatacagccaggattgcgttcgcgccgaatttggatttgttttcggtgccgtccaggtcgatcatgatcttgtcaatgccagcctgatctttagcatctttgccaatcagcgcctgagcgatcgggccgtttaccgcagcaacagctttggttacgcctttacccaggaaacgggatttgtcgccatcgcgcagttccagagcttcacgggaaccagtagaagcaccactcggagcagctgccataccgacgaaaccaccctccagatgtacttcggcttcaacagtcgggttaccacgggagtcgatgatttcacgaccgatgatttttacgattttggacattaggttttcctcaagtcactagttaaactgaaactccagacaaacaacgcgtacccagggtacgcgttgccgctctaacttttttacttacttcgcctgacgtttctggaactcgctggcggctttcacaaagcctgcaaacagcgggtgaccatcacgtggagtagaagtaaactccggatggaactggcaagccacgaaccacgggtgattcggaacttcgatgatctcgaccaactgatcatccccggaacggcccgcaacgcgcagacctgcatcttcaatctgtttcaacagcatgttgttgacttcgtaacggtgacgatgacgctcaacaattgtcggcgcattgtacagctggcgaaccaggctatcgtcaaccaactggcactgctgtgcgccgagacgcatggtaccgccgagatcgctcttctcgctacgaacttcaacgttgccgttttcatcgcgccactcggtaatcagcgccacaaccgggtacttacagtctggcacaaattccgtagagttggcgttctccatgttggcaacatggcgagcgtaatcaattaacgccacctgcatacccaggcaaatgcccagataaggaatattgttctcacgcgcaaaacgcgcggtcgtaatcatgccttctacgccacgatagccgaaaccgccaggtacgaggattgcgtccagacctttaaggatttcaacgccgcgcgtttcaacatcttgactatcgatcagtttgatgttgacgctgacacgattcttcagcccaccgtgtttcagtgcttcgatcacacttttataagcatccggcagttcaatgtacttgccgaccataccgatggtgacttcacttaccgggttcgcttcttcgaagataacctgttcccattcggacagattcgcttccgggcagtttaagctgaatcgtttacaaatataatcgtccagcccctgagatttcaacaggcccggaattttatagatggaatcgacgtctttcagagaaataaccgctttttccggaacattacagaacaatgcaatcttcgcacgttcgttcgccggaacagcgcgatcactacgacaaatcaggatgtcaggctggataccgatggagagcagctcttttacagagtgctgagtcggtttggttttgacttcaccagacgctgccatgtacggcaccagcgtcaggtgcataaacagagtgtgctcacggccaatttcaacagccatctggcgaatcgcttcgaggaacggcaaggattcgatatcacctactgtaccgccgatttctaccagtactacgtcatgaccttcgccaccttccagcacgcgctctttgattgcgttagtgatgtgcggaataacctgcacggttgcgccgaggtagtcaccgcggcgttctttacgcagaacgtcagagtagatacgacccgtggtgaagttgttgcggcggctcattttggtacgaatgaaacgctcgtagtgccccaggtccaggtcggtttcagcgccgtcttcagtaacgaacacttccccgtgttggattgggctcatagtacctggatcgacgttgatgtacggatccagtttcatgatggtcacattgaggccacgggcttcaagaatggctgcgagggaggctgcggcaatgcctttacccagagaggatacgaccccgccggtcacaaaaatatagttcgttgtcatgctgaacctgagaagttaggttgaaaagacgatggaataaccaagacgggaaagcagtatacccgaacatgacctgtgccacaaactttcattatccctcctcttcgccagcgcactattgaaatcaggagtgagaaaatagcccctttggggtaaatgtttttgacgcaaatcaagcgcttgtcatttaaaaaatgacacaaatggcgcttgaccgcgtaattcccttagagatcaatttcctgccgttttacctgttgccagacttcttccattgtttcgaggtcaacacctgtcatttccagtccacgcgcggcaacaatacgctccacttcgcgaaaacgacgctcgaatttttcgttcgctttttgcaatgcgatttctgctttcgtccctaaatggcgagccagattaaccgtggcaaacagcaggtcccccatttcctcctccagtttagcctggtcgacaacagcctgccgcgcttcgtacatcacctcgtcgatctcttcgtagactttatcgactaccggaccaagcgtcgtccaatcgaagccaacgttggcgcaacgtttctggattttttgcgcacgcattaaagccggtaaactacgaggaatatcgtccagcgcgctatgctgcgctttctgcgcgcgctcttcggttttgatttgctcccaacgggcaagcacttcactactgttttcggcagaactatcagcaaaaacatgcggatggcgacgctctaatttatcgctaatagcagcgcaaatatcattaaagtcaaagcgcccttcttcctgagccatttgcgcgtaaaacaccacctggaatagcagatcgcccagttcaccgcgaagatcgtcaaaatcttcacgggcgatggcgtccagcacttcgtaggtttcttcaagggtgtaaggcgcaatggtggcaaatgtctgctctttatcccacgggcagccgttttccggatcgcgcaggcgctgcataatagtgagcaaacggtcgatttgattcattgaattgtcctgaaaattgcgggtctgtcaggtggaaacctgtgaccagaatagaagtgagttagtaacattacccaatcagtacgttaattttggctttaatgagttgtaattcctctggggcaactgttcctttcttcgttgctcctcttgcccgccaggcgatactttttacctgatcagctaacgctacgccatcacgttcctgaccggataaaacaacttcgaacggatatcctttactttgcgttgtacaaggaacacacagacacatacctgttttgttgttgtacatgaaaggactcaggacaacagctggacgatgtccagcttgctcgctaccttttgtcgggtcaaaatcaacccaaatcagatcgcccatatcgggtacgtatcggcttaccattaccagacttccttatctttcggctctccccagtcgatattctcgtggaggttttccggcgtgatgtcgttgaccagttcagcaagcgtaaatacgggctctttacgcactggctcaataattaatttgccatccaccaggtcaatcttcacttcatcatcaatattcagattgagcgcctgcattaacgtagccgggatccgcaccgccggactatttccccaacgctttacgctactgtggatcataaccctttcctcaaaccgctatcatatgtagatacagtatatatcaatctacattgtagatacgagcaaatttcggcttaactcccgtgcaaccgacgcgcgtcgataacatccggcacctggttgagtttacccagcacgcgccccagcacttgcaggttgtaaatctcaatggtcatgtcgatggtcgccagttgctgtttggtgtcgctacggctggcaacgccaagcacgttcaccttctcgttggcgagaatggtcgtgatatcacgtaacaacccactacgatcattagctaccacgcggaccaccaggctatatccggcggagtagctctcaccccataccgcgtcaacaatgcgttctggcgcatgggagcgcagttccgccagttgttcgcaatcggcgcggtgtacactaataccgcgcccctgggtaatgaagccgacaatctcatctccaggaatcggctggcagcagcgcgcgatgtggtgcatcaggttgccaacaccttcgactaccacgcgaccgttatctttactgcggttttgcggcgtgtagcttttttgctgaagttgcttcagcgcggcggcgtcctgctcttcggcactcggcttattaaattggctttgcaggaagttcaccatctgattgagacggatatccccgccaccaatcgccgccagcaactcgtcgacatcattgaagttgtaacgcggcagcagatgtttttctgcttctttcaggctgatccccagatgttccagctcgtcgtcaaggatttgccgcccagccagaatgtttttgtcacggtcctgtttacggaaccaggcgtgaattttgctacgcccacggctggttgtgacgtaaccgaggtttgggtttaaccagtcacggctggggttcggctgtttctgggtgataatttcaatctggtcgcccatctgcagctggtaggtgaacggcacaatgcgcccgccaatttttgccccgatgcagcggtgtccgacatcactgtggatgtggtaagcgaagtccagcggcgtacttcccgcaggcaaatcaacgacatcacctttcggcgtaaagacgtacacccggtcgtcaaagacctgactacgtacttcgtcgagcatttcgccggaatcagccatctcttcctgccacgcaatcagtttacgcagccaggcaatccggtcttcatgtccgctacgtgcgccgccagcagccgcgccctctttatatttccagtgcgcagcaacacccaactctgcatcttcatgcatctgtttggtgcggatttggatctcaacggtttttccacccggccccagaaccacggtatgaatagactgataaccgtttggtttcgggttagcgacgtaatcgtcaaactcatccggcaggtggcgatagtgagtgtgcactatccccagtgcggcatagcaatcctgtaaacgctcggcgacaatacgtaccgcacgcacatcaaacagctcatcaaaggcgaggttctttttctgcattttacgccagatgctgtagatgtgtttcggacgaccatacacttccgctttaacgccttcagctttcatctcagcgcgcagatgaccaacgaactcttcgatgtagtgttcgcggtcgagacgccgttcatgcagcagtttggcaattcgtttgtattcggttggatggaggtaacggaagcagtaatcttccagttcccatttcagttgtccgattccgagacggttagccagcggtgcgtagatgttggtacactcttttgccgccagtacacgttcatcttccggcgcatcttttacttcgcgcagatgagcaatacgctccgccagtttgatgactacgcagcgaaaatcatcgaccatcgccaataacatccggcgaacgttatcgacctgttcggaggaaacagaatcagtgtgcgtcgctttcagctggcggatcgccgccatatcacgcacgccgtgaataaggttaacgacgctcttaccgacgctctcacgcagcacatcttcgctgactacgttggcatccgccagagggaaaagcagcgccgcccgcagcgtgtcaatgtccatacttaatgtgctgaggatctccaccatctcaacaccacgccacaataacagactggcatccggatgcccctgcgtctgttgcagacaatacgcccaggtttcggctaagcactcacagctcttctggctggtaatacccagacttgcgatccatttttccggatcaaattcaccagccttattgatatgtgcacttcttaccgcaaccatcgtcctctcctttagggaccagacctgccgaaatcggcaaatcgcaattatttaacgcggctgaaaagtaccatgctttccagatgtcccgtgtgtgggaacatatccagcatcgccagtcgcgcaatggtatatcctgcttttaataacgcttcgctatcccgagccagcgttgcagggttacaggatacataaactatacgaataggttccagttttataatttgctgcataacacctgcggcacctgctcgcgccgggtccagcaacactttatcgaagccgtttttcgcccacggctgctttgtgacatcttcttcaagattttcgtgataaaacgtcacattctgtaagccattaagacgcgcattctgctggcctttttccaccagcgccggaacaccttctacaccgaccacactggcagcttgtgtcgccaatggcagtgtaaagttgcccataccgcagaacagatccagtacgcgatcttcaggttgcacatccagccattccaacgcacgcgctaccattttttggttcacacccgcattgacctgaataaaatcgcgcgggctaaaagttaagcgcaacccgttactgtcataccagggcatctcaccagagacggtttcgagtatctcactatcgggggcgagatacagatccaggccttcagaatggctaaagcgttccagtttttcgcgatctgcgctacttagcggtgcggtatggcgcaaaatcatcagcgtgccgctggttgcctgtaccagttcaacatgaccaagatggcgcatagcttgtaagctgcccagacatgccctgactttgggcagcaatgcttcaagttggggcgctaaaatggggcattgtttgacgtcgacaatgtcactggagcccgctttgcgaaaccccatctgaagttgctgtgttttcggtaagtagttcagacttaaacgcgcgcgacggcgatagccccagggaacatcggcgatcacttcagagacatcgtgtttcattaatcgggcgagtgccgcacttttgcttcgctgctgtaaatccacgctggcgtgttgttgctgacagccaccgcatacgccaaaatgaggacagcgtggcgtttcgcgttccgggctatcgcttaaccggcgtacgactttagcgcgggcatactgttttttatcttcagtaacagtaacttccgcgttttcctgcggcaataatccggggataaatagcgttttgccgttatgtcgcgccacgccctgaccaaaagagtcgaggtcgttgacactaacggttatgatctgacgcgtcgtcgtgcgtcgttttgcagagtagaattgcgccattggcgagactttctcaatttaacagtgtgaccttaattgtcccataacggaactccatgaccaactacagcctgcgcgcacgcatgatgattctgatcctggcaccgaccgtccttattggtttattgctgagtatctttttcgtcgtgcatcgctataacgacttgcagcgtcaactggaagatgccggtgccagcattattgagccgcttgcagtttctactgaatatggcatgagcctgcaaaatcgcgaatctatcggtcagttaataagcgtactgcatcgtcgccattccgatattgttcgcgcgattagcgtttatgatgaaaataaccgactctttgtcacctccaattttcatcttgatcccagtagtatgcagctcggcagcaacgtgccgtttcctcgccagctcactgtcactcgtgacggcgatattatgatcctccgcacgccgattatttctgagagttactcccccgacgaaagccccagtagcgatgccaaaaatagtcaaaatatgttgggatatattgcgctggagctggatcttaaaagcgttcgcttgcagcaatataaagagatctttatttccagcgtgatgatgctgttttgtatcggtattgcgcttatttttggctggcgcttaatgcgcgatgtaaccggtccgattcgcaacatggtgaataccgtcgaccgcatccgtcgcgggcaactcgacagccgggtggaaggatttatgctcggcgagctggatatgctgaaaaacggtatcaacagcatggcaatgagcctggctgcttatcacgaagagatgcagcacaatatcgaccaggcgacgtccgatctgcgtgaaacgctggagcagatggaaattcagaacgttgagttagatctggcgaaaaagcgcgcccaggaagcggcgcgtattaaatccgagtttctggcaaatatgagtcacgagctgcgtacaccactgaatggtgttattggctttacccgcctgacgctgaaaacagaattaacaccaacgcagcgcgatcacctgaatacgattgaacgtagcgcaaataatttgctggcaattattaatgatgttctcgacttcagcaaactggaagcaggtaagctgattctggaaagtattccattcccactacgcagcacgctggatgaagtcgttactctgctggcacattcttctcacgataaagggttagaactgacgctcaatattaaaagcgacgtgcctgataacgtgatcggcgacccgctgcgattacagcaaatcatcactaacctggtggggaatgcaattaaattcaccgagaatggcaacattgatattctggtagaaaaacgtgcgctgagtaataccaaagtgcagattgaagtgcagattcgggataccggcattggtattcctgaacgcgatcaaagccgcttattccaggccttccgacaggctgatgccagtatttcccgccgtcatggtggcaccgggctggggctggtgattacacaaaaactggttaatgaaatgggcggcgatattagcttccatagccagccgaatcgcggtagtactttctggttccacattaatctcgatctgaacccgaacattattatcgaagggccatccacccagtgcctcgcaggtaagcgcctggcctatgtcgaaccaaactccgcagcagcgcaatgcacgctggatattttaagtgaaacgccgctggaagtggtttatagcccaacgttctccgcgctgcctcccgcgcattacgacatgatgttgttaggcatcgcggtgaccttccgcgagccgctaacaatgcaacatgagcgattagcgaaagcggtaagcatgaccgatttcctgatgctggcacttccttgccatgcacaagtcaatgctgaaaaactcaagcaagatggtatcggcgcgtgtctgctgaaaccattaacacctacacgcctgttgcctgccctgacggaattttgtcatcacaaacaaaacacgcttttgcctgtaaccgatgaaagtaagctggcaatgacagtcatggcggttgatgacaaccccgctaacctgaaacttatcggcgcattgctggaagatatggtgcaacatgtggaactttgcgatagcgggcatcaggcggttgaacgggcgaaacagatgccgttcgatttgatcttaatggatattcaaatgccggacatggatggcattcgggcctgcgaactcatccaccaactcccgcatcagcaacaaacgccggttatcgcggtaacggcgcatgcaatggccgggcaaaaagagaagctgcttggcgcagggatgagcgattatctggcgaaaccgattgaagaagagcgattgcataatttgttgttgcgctacaagcctggcagcggtatttcctctcgcgtcgtgacgcccgaagtcaacgaaattgtggtgaacccgaatgcgaccctcgactggcaactggcactacgccaggcagcaggaaaaaccgatttagcgcgcgatatgctgcaaatgttactcgatttcctgcctgaagttcgcaacaaagttgaggaacagctggttggagaaaacccggaaggcctggttgatttgattcataaactgcatggcagttgcggctatagcggtgtgccacgtatgaagaatctctgccaactgatcgaacaacagctacgtagcggtactaaagaagaagatttggaaccggagctgctggaactgttggacgagatggataatgtcgcgcgcgaagccagcaaaattctcgggtaatggatgtcttgtcgagtagcaatcggctttttatgacgctggtttcagattggtgacaaagtgcctgtgtttatgccggatgcggcgttaacgccttatccggcctacaaaaccaattaaattcaatgaattaaaaaatgatgtagacctgatacatagcacaacaggctattttgcgtttagcatcagtctcaaaccggctccagatagagccggttttggttttctgtcttaacgcaccatgcacgggcgcttgttatcgaacgtccagccaggaatcagatactgcattcccatcgcatcgtcacgcgcgccaagcccgtgtttctgatacagctcatgggctttcatcacttgatccatatcgatttctacacccagccccggtttttctggcacctgtaccagcccgcctttgatctcaaacggttctttggtcaggcgctgattgccttcctgccaaatccagtgcgtatcaatagcagtaattttacccggtgcagcggcggcaacatgggtaaacatcgccagggaaatatcgaagtggttgttagagtgactaccccaggtcaggccaaattcatggcacatttgcgccacacgtacgctaccttgcattgtccagaaatgcggatccgccagcgggatatcaacggattgcagggagagcgtatggcccatttgccgccagtcggtggcgatcatattggttgcagtcggtagacctgtcgcgcgacggaactctgccatcacttcacgcccggagaaaccttgctccgcaccacacggatcttctgcataagccaggctacctttcaggtatttaccgattttaatcgcttcgttcaggctccaggcaccgttaggatcgagcgtaatacgcgcctgcgggaagcgttgcgccagtgccacaatagactcggcctcttcttccccggccagtacaccgcccttcagtttgaaatcgttgaagccatatttttcatatgccgcttccgccaggcgcaccaccgcatccggcgtcatcgcttcttcatgacgcaggcgataccagtcgcaactgtcatccggctggctttgatacggcagcggcgtggctttgcgattaccgacgaagaacagataaccgagcatttcgacttcgctacgctgttgaccatcgcccagcaggcttgccacgtttacccccagatgctgccccagcagatccagcattgccgcttctatcccggtaactacatgaatagtggtacgtaggtcaaatgtctgcaaaccgcgcccaccagcatcacgatcggcaaaagtattacgcaccagcgtcagaacgtttttgtattcacccagcgttttacctaccaccagcggaatcgcatcttccagcgttttacggattttctcgccgccgggaatttcccctacgccagtgtgaccagaattatctttgataatcacaatattacgcgtaaagaacggtgcgtgtgcaccactcagattcatcagcatactgtcatgacccgccaccgggataacctgcatttcagtaacaacaggcgtcgtaaattgagaactcatatttatgtcctttttcagaatcaatgacggccgaaaacgggacgtttacggtcaaaggtccagccggggatcaggtactgcatcggacctgcgtcgttacgcgcaccgccaggcagacgtttataggcctcatgtgccttttgtacctgttcccagtccagttccacgcccagaccgggcgcatcaggaacggcaatttttccgtttttaatctccagcggattttgggtcaggcgacaatcgccctcctgccaaatccagtgggtatcgatagcggtaggattacccggtgccgccgcgcccacatgggtaaacatcgccagagagatatcgaaatggttattagaatggcagccccaggtcagcccccagtcgtcgcaaagctgcgccacacggactgcaccggaaagcgtccagaagtgcggatcggcaagtggaatatctaccgcattgagcatcaccgcatgacccatttcgcgccagttggtggcgatcatgttagtcgcgacgggcaagccggtcgcccgtcgaaattccgccatcacttcacgtccggagaagccctgttctgcgccgcatggatcttcggcataggtaagaacatcattcagccctttgcataaagaaatggcttcatcaagcagccatgcaccgttgggatcaacggtaatccgcgcatccgggaagcgtttcttcaatgcacgaacagtgtcgatttcttgctcgccaggtaacacgccgcccttaagtttgaaatctttaaagccgtagcgatcctgactggcttccgccagacgcacaacggcttcgctgttcattgctttctgatgccgcaactgataccactcatggttgcccggcgtattttccacataaggaagatcggttttggtccgatcaccgatataaaacagataaccgaggacggtaatagcctcgcgttgcttgcctggccctaacagttcgcagaccggaacattcagcgccttacctagcaggtcaagcaaagcggcttccagcgccgccacggcgttaacgcgtaattcaaaggtccaggcacctttaccgaaggtatcaaaatcggcggcctgattacctttatgcacctgctggaccactttattcagtcgcgcaacttcctggcccagaaccatcggaatagcatcgacaagcgtctgataaatcacatctccgcccggcgcttcaccaatgccggtatgcccggcgttatcggtgagtaccacaatattgcgggtgaaatatgcgttatgtgccccaccaatattaagcaacatgctgtcatgcccggccaccggaatgactttcatatcagtaataacaggactggattgtgtcgccatcttattgccccgcaacaggtttcaactcgatacgcttgatatcgcccaccagcaccaggtagctcagtaccgcgattaaggcatgaacaccaacataaatcagcgccccattaaagctgccagtcgtgccaacgatataaccaattgcgattggcgtgacgatgccagaaatgttaccgaacatgttgaacaggccaccggaaagaccgctgatctcttttggcgcggtatctgccattactgcccaacccagcgccccgatgcccttaccgaagaaggccagcgccataaagccgatgatcatccactcaacgttgacgtagttgcagaacaccatcaccatgctcagcaacatgcccattacgatcggtgttttacgcgcaatgttcaggcttcccgtgcggcgcatcagccagtcggaaataatcccacccagcacaccgccgataaaaccgcaaaccgccggaacggaagccacaaagcccgctttcagaatgctcatcccgcgtgcctgcaccagataaaccgggaaccaggtaataaagaagtaagtcagggcgttgatacagtactgaccgatataaacgccgatcatcatccgactccctagcagctgtttgatctgcccccacttcacgctgaacggcactttaactttggtgttttgctgatccatattgatcagcgcaccacccgcggcgatgtactccagctctttcttatttacccccggatgttgatttggctcgtggatgactttcaaccagataaagctgatgacaatccccagaccgcccataaagaagaagacgtgactccagcccacttcatgcgtcagccagcccataatcggcgcgaagatcaccgttgcgaagtattgagcggagttaaaaatgctcaccgccgttcccctttcctgcgccggaaaccaggccgcaacaatgcgactgttgccggggaaagatggcgcttcagcaagcccgaccaggaagcgcagcgtaaacagggcaacgataatgccgaatccactaaagatatcgacgaagccttgcagcaaggtaaacatgctccagataaagatgctccagaagtagacgcgtttactaccaaaacggtccagcaaccagccaccagggatctgcccgataacataagcccaactgaaagcagagaacacatagcccattcccacgggatcaaggccgatatctttggccatttcgctaccggcgatagagagcgtagcgcggtcgccgtagttgaaggatgtgacgataaacaacatcaccactatccagtaacgagcatttgtgcgtttttccacactgctcgcagcctgacttaaagaactcattgttgcactcctgaaaattcgcgttagccacgctcactctggactgcgacatcgccaggaaatcagaggtgacgtagggtgttttttgccgtttttataggtcgttcgccgaatacggcgcgtgtttatatctggcaatagcagtataaaaagcgcgccatagcggctcaccgtgcaacaacacaacattaatgcgttcaatgaggcccgattttggcattagccctggacggtggaatccacttcacggaaatgaaaacaagaacaagaaaggaagggttaaaacgaagaaataaagaagagtatgaaatggatcgcttgactccaggcaaacgccagtaaaaatccgcgctatgaagcagtttttactggcatttgcctgaaaagattcgattcagcaccgctaaaacgacatttaccgctcgctgaacatatcaggacaacagcgtgccccactgttcgacccacggattactttccgtttccggttccgggttctcactggcgtcaatcaacagcatttcgccaacccgctgagcgctctgttcctgcaacaaggcatcgaactgtttgccgccattgcagaaattcacataactactgtcgccgagcgcaatcacgccataacgcagattcggctggaagcccagactatctttgattccctgaaagagtggcacaatgctatcaggaaggtcgccctgcccggtcgtggacgtaaccaccagaacatacttatcctgatagggcagccagtcgcttaattcaggatcttcaaataccgttgctttgtggccctgcgcggtcagaatcgcttccgcttcttcggccactaacagactattcccgtacatggtgccgacaaaaataccaatttccgccataccgttttctccctggattaggaacttatctctccatcctgaccgcttggcgcactgaactcaaccctttcattttcaggaagcagaccgcgccagccaaattgacttaacgcctgcatccaggtgtcgtccaggcccgcgtgaatagtcagcggctcgccagtaaaaggatgcgtcaaactcaactgactggcatgtagcattaaccgctggaggccaaaatgctcagcaccgctgcgattctggcgtaaatcgccatgtttgctatcgccaataatcggatgacgcaaatgggcaagatgtcggcgaagctgatgtttgcgtccggttttcggctccagttccaccaggccgtagcgcgtggtcgggtaacgtccggtcgctaccggcatttctacggtcgccagaccgcgataatgcgtcactgctggctgcgggcctttatcttcgcgggcaaatttatcagcgattttgtccagttcttccaccagtggataatccagcaccgcttcttccatcaaccagccgcgcacaatcgcatggtaacgtttctggatttggtgctgttcaaactgttgtgccagcagccgtccggcctcgctggataatcccatcaacaacacaccagaagtgggtcggtccagacgatgagcagtaaaaacatgctggcctatctggtcacgcacggtttgcatgaccactactttctcgtcgcgatccagccagctgcggtgaaccagccagccggagggtttatttaccgcaaccagccattcatcctgatagagtatttccagcattagctcgcatcatccgcaaaaagagcatccagtttttccagctcagccagaataagcgcgcgttgcggatggtccgtcgccagcgccatttcataatagggtgcaacggcaaaagcgcccggtaacggctgtttgttatctaacaaatcgtgcattcgcgggatcagcacccactgcaaccactccagtggttccatggtgtccataaagaacggttgggtactattaaattgatgcggctggggttcatcgtttcgccagtgctgatgttcacgcagtaacgcttcaagcgcctgcaactggagacgaacgcggtcatgagtggtcataaagcaacctcaataagaaaaactgccgcgaaggatagcaggaataaaaaaagggagcactgtattcacagcgctcccggttcgtttcgcagcattccagctacttttgttgctccctgctcatccttgacaacttttcctctggccttgcggccaatcgttcatcctgaactattgcttcctgctcacaccaccccgatgtgatacttcatcctgaagtgtccctggccttcctgacccaccgaatcatcctgaccggttctcattctccatcctggaggtgtcctttaacgcgtcctgcgtcatcctcttcgcttcatccagaagcctttccctgaaacaccatcctggtgtgtcctgcagaagtgtcatcatcctgatgttcacttcgttgtctgactccctgtcgacgaagatagaatcgtctttttcgcgaagtcttacaaggcgcttacagacaatgccttaaggaaaatttcatatgaaagttaagaattaacaatcaacattttgattttaaatgaaaataacgattcttatctttttaagtattcgcttatttcctggcgatctcctacagagtctgtaagagatctctcacaaccagatggggtatttggattacagaagaggcttaagttgattaaggaattccgcaagattactggctaaatgcgtccgtttacgtgttcccagcgtctctttgcacacttcaccggagagattacacacgctgatgacctctaactcttcttccagcgtcgcgataaatagtgtgggcggcagttttagccttttctgagtcaccagatgaccaatcagattttcctgcacccgacggaagtcgtcttcactccaggtttgcagcaatgtcagtttgatatcgccaaactgcgcgtgcatatccccggcaaactgagtcgtataaaaggtatgaattgtgggttgtatcacaatatcaaaagcgcgttcaaccgcgtttacattttgttccccggtaaacggctggggttgccagtatacggcatcttcggtagtactaataatgcacggactaggaacaccgtacagttcctcacttaacggccagcttttatgctcttcatgccacgcatcgcagtagcgtgcagtaaaatctttcagggcttgtgcggtcaaatcgtccactaatttctctcttcacttaaaccagatacacttgtcgtttagtttatctggtttatgacggtgaaacatgtcttcttatgcaaaccatcaggcacttgcgggcctgactcttggaaaaagtaccgattaccgggatacctatgacgccagcctactgcaaggcgttccacgcagcctgaatcgcgacccgctgggtctgaaagcggataacctgccttttcacggtacggatatctggacgctgtatgaactttcctggctgaatgcgaaaggtttgccgcaggtcgctgtcggtcatgttgaacttgattacaccagcgtaaatctgattgagagcaagagttttaagctctatctcaacagttttaaccagacgcgttttaataactgggatgaggtgcgccagacgctggagcgcgacttaagcacttgcgctcagggtaagattagcgtggcgttatatcgtcttgatgaactggaaggccagccgataggtcattttaatggcacttgcattgatgaccaggatatcactatcgataactatgaattcactactgactatctggagaatgccacctgtggtgaaaaagtagtggaagagacgcttgtcagccacctgctgaaaagtaactgcctgatcacccatcaaccagattggggtagcctccaaattcagtatcgtggacgccaaattgacagagaaaaactgctgcgttacctggtcagtttccgtcatcacaacgagttccacgaacagtgcgtggaacgcatctttaatgacctgttacgcttctgccagccagaaaaattgagcgtttacgcacgttatacccgtcgtggcggtctggacattaacccgtggcgcagtaatagcgattttgtcccaagcaccacaagactggttcggcaataaattttttctcaattttgcgtgctggattcacgcagaaggttgtgaaaggtcatcaggcagggctattgtaatcaaagggaatgacgatattcgtcccataaggagtttttcttgattacacatattagcccgcttggctccatggatatgttgagccagctggaagtggatatgcttaaacgcaccgccagcagcgacctctatcaactgtttcgcaactgtagtcttgccgtactgaactccggtagtttgaccgataacagcaaagaattgctgtctcgttttgaaaatttcgatattaacgtcttgcgccgtgaacgcggcgtaaagctggaactgattaatcccccggaagaggcttttgtcgatgggcgaattattcgcgctttgcaggccaacttgttcgcggtcctgcgtgacattctcttcgtttacgggcaaatccataacaccgttcgttttcccaacctgaatctcgacaactccgtccacatcactaacctggtcttttccatcttgcgtaacgctcgcgcgctgcatgtgggtgaagcgccaaatatggtggtctgctggggcggtcacagtattaacgaaaacgagtatttgtatgcccgtcgcgtcggaaaccagctgggcctgcgtgagctgaatatctgcaccggctgtggtccgggagcgatggaagcgccgatgaaaggtgctgcggtcggacacgcgcagcagcgttacaaagacagtcgttttattggtatgacagagccgagcattatcgccgctgaaccgcctaacccgctggtcaacgaattgatcatcatgccagatatcgaaaaacgtctggaagcgtttgtccgtatcgctcacggtatcattatcttccctggcggtgtgggtacggcagaagagttgctctatttgctgggaattttaatgaacccggccaacaaagatcaggttttaccattgatcctcaccggcccgaaagagagcgccgactacttccgcgtactggacgagtttgtcgtgcatacgctgggtgaaaacgcgcgccgccattaccgcatcatcattgatgacgccgctgaagtcgctcgtcagatgaaaaaaagcatgccgctggtgaaagaaaatcgccgtgatacaggcgatgcctacagctttaactggagtatgcgcattgcgccagatttgcaaatgccgtttgagccgtctcacgagaatatggctaatctgaagctttacccggatcaacctgttgaagtgctggctgccgacctgcgccgtgcgttctccggtattgtggcgggtaacgtaaaagaagtcggtattcgcgccattgaagagtttggtccttacaaaatcaacggcgataaagagattatgcgtcgtatggacgacctgctacagggttttgttgcccagcatcgtatgaagttgccaggcagtgcctacatcccttgctacgaaatctgcacgtaatctccgctcccccggtgacgtttgttgccgggttttctcgtttttggtcacttactcatcaactcatttcatttgttatatgaatgtttcttaccaccctcacgcgacaaatatcatcacagttaatatgtcatacaatttatgttgcaacgcaaacgtttccctattttcataaaccgtattttatcgctatgaaaaagaaattatcgccatgattaactaaaagtattgattttttcagttcaacctacatatattgcgcgccccggaagaagtcagatgtcgtttaatgggcaaatattgcccttaaattctcttttacttttgatttacagagtaaagcgttgggataatctatcttccaagtagattattgtatttgagatcaagatcactgatagatacataacttgtgtgtatctttccgccctcaaattattacggcggtaaatgattaagccatcgccgatagacagatttcatttttacggtcaggcaccttcccgggctgaactggctaaaagctgaattatttgcattcctccaggagaaatagatggaaacgactcaaaccagcacgattgcgagcaaagactctcgtagtgcctggcgcaagacagacaccatgtggatgctgggcctttacggcacggcaatcggcgcgggcgtgctgttcctgccaatcaacgccggtgttggcggtatgatcccgctgatcatcatggctatccttgcgttcccgatgacgttttttgctcaccgcggcctgactcgcttcgtactgtctggtaaaaacccgggcgaagacatcaccgaggttgtagaagaacactttggtattggcgcaggtaaactgattaccctgctctacttcttcgctatctacccgatcctgctggtttatagcgtggcaatcaccaataccgttgaaagcttcatgtctcaccagctgggtatgacgccaccgccgcgtgcgattctgagcctgatcctgatcgtgggtatgatgaccatcgttcgcttcggtgagcagatgatcgttaaagcgatgagtattctggtattcccgtttgttggcgtactgatgctgctggctctgtacctgatcccgcagtggaacggcgctgcactggaaacgctgtctctggacactgcatctgcaaccggaaacggtctgtggatgaccctgtggctggcaattccggtaatggtgttcagcttcaaccactctccgatcatctcttctttcgccgttgcgaagcgtgaagagtacggcgatatggcagaacagaaatgcagcaagatcctggcattcgcacacatcatgatggtgctgaccgtaatgttcttcgtcttcagctgtgtactgagcctgactccggcagacctggctgcggctaaagagcagaacatcagcattctgtcttacctggctaaccactttaacgcaccggttatcgcgtggatggctccgattatcgcgattatcgctatcaccaaatccttcctcggtcactacctgggcgcacgtgaaggcttcaacggtatggtgattaaatctctgcgtggtaaaggtaagtctatcgaaatcaacaagctgaaccgtatcactgcgctgttcatgctggtaacgacctggattgttgccaccctgaacccgagcatcctgggtatgattgaaaccctgggcggtccaatcatcgcgatgatcctgttcctgatgccgatgtacgcaattcagaaagtaccggcaatgcgtaagtacagcggtcacatcagcaacgtattcgttgtcgtgatgggtctgattgcaatctccgcaatcttctactctctgttcagctaagtcctttcgcgccgctttcgggcggcgcttcctccgttttaacgcgatgtatttcctatgattagcgtattcgatattttcaaaatcggcattggcccttccagttctcataccgttggaccaatgaaagcgggtaaacaatttaccgacgatctgattgcccgtaacctgcttaaagacgtgacccgcgtggtggttgacgtgtacggcagcctctctctgaccggtaaaggccaccacactgatatcgccattattatgggcctggcgggtaacctgccggataccgtggatatcgattccatccccagttttattcaggatgtgaatactcatggtcgcctgatgctggcaaacggtcagcatgaagtggagttcccggttgatcagtgcatgaacttccacgccgacaacctttctctgcatgaaaacggtatgcgcattaccgcgctggcgggcgataaagtcgtttacagccagacttactactctattggcggtggctttatcgttgatgaagagcattttggccagcaggatagcgcaccggttgaagttccttatccgtacagtagtgcagccgatctgcaaaaacattgtcaggaaaccgggctgagtctctctggcctgatgatgaaaaacgagctggcgctgcacagcaaagaagagctggaacagcacctggcgaacgtctgggaagtcatgcgcggcggtattgagcgcggtatttccaccgaaggcgtgttgcctggcaaactgcgcgttccacgccgtgctgcggcactacgccggatgctggtcagccaggataaaaccaccactgacccgatggcggttgttgactggatcaacatgtttgcactggcagtgaacgaagagaacgctgctggcggtcgcgtggtgactgcgccgactaacggtgcgtgcgggattatcccggcagttctggcgtactacgacaagtttatccgcgaagtgaacgctaacagtctggctcgttacctgctggtagccagcgccattggttctctttataagatgaacgcgagcatttctggtgctgaagtgggttgccagggtgaagttggcgtggcgtgcagtatggcggcggctggtctggcagaactattaggcgcaagcccggcgcaggtgtgcatcgcggcggaaatcgccatggagcacaacctcggtctgacgtgtgacccggtcgccggacaggtacaggtgccatgcatcgagcgtaacgccattgcggcagtaaaagcggtgaacgccgcacgtatggcgctgcgccgtaccagcgagccgcgcgtctgcctcgataaagttatcgaaaccatgtacgaaacaggtaaagatatgaacgccaagtaccgcgaaacctctcgcggcggcctggcaatgaagatcgttgcctgcgattaatcgctctccaaaggcctcgttttgcgaggcctcttcccgatttctcatccagccgtagcctgttccggcatcgaatgttacccttatcgcctgatctttaagggggttatcgtggctgttcatttgcttattgtcgatgcactgaatcttattcgtcgcattcatgccgttcaggggagcccctgtgtcgaaacctgccagcatgcgctcgatcagctcattatgcacagccagccaacccacgcggtcgccgtttttgatgatgaaaaccgcagtagcggctggcgtcatcagcgtttaccagattacaaagcgggtcgaccgccaatgccggaagagttgcacgacgagatgcctgcattacgcgccgcctttgagcaacgcggcgtcccgtgctggagtaccagcggcaacgaagccgatgacttagccgccacgctggcggtcaaagtgacacaggccgggcatcaggcaacgattgttagcacagataaaggctactgtcagttacttagtccgacattacgtattcgtgattacttccagaaacgttggctggatgcgccatttatcgataaagaatttggcgttcaaccgcagcagttgcccgattactggggacttgcggggatcagcagtagtaaggtaccgggtgttgcgggaatcggaccaaaaagcgccacgcagctgctggtcgagtttcagagtctggaagggatatatgagaatctggatgcggttgccgaaaagtggcgcaaaaaattagaaacccataaagagatggcgtttctgtgccgcgatattgcccgcttacaaaccgatttgcatatcgacggcaatttacagcaattgcggttggtacggtaacggcgagccggatacgccgcaaacgtcgtatccggcattatcacatcagcgcatttaccaggcggtatggtaaagctctacaatatcctcaagcgttgcttcacgcgggttgccaccggtacaaacatcatccagtgccgcctgcgccagtgccggaatgtcttccttgcgtacaccaacatcacgcaaatgtggcggaataccgacatcacggttgagagcaaacaccgcttcaacagcggcattacgcgcctcttccaggctcataccttccactttcacgcccataacgcgcgcgatatcgcggtacttctcaccggtaaagtcagcgttataacgcatgacatgcggtaacaggatggcgttcgcaacaccgtgtggagtgttataaaacgcgcccagtggatgcgccataccatgcaccaaccctaacccaacattgctgaagcccatacccgcaacatactgcccgagcgccatttcttctccggcatccttatcaccagcaacgcttcctcgcagcgccccagcaatgatttcaatcgctttaatgtgcagtgcatcggttagcgcccacgcgccacgggtaatatacccctcaatagcatgagtgagcgcatcgacacccgtcgcagctttcagcgctggaggcataccatccatcatgtcagcgtcaataaacgccacctgcgggatatcatgcggatcaacgcaaacaaacttgcgccgtttctcttcgtcagtgatcacgtagttaatggtcacttctgccgcagtacctgctgtggtaggaattgccagaatcggtacactgggtttattggtcggggaaagcccttccaggctacgcacatcggcaaactccgggttgttgctgataatgccaatcgctttacaagtatcctgtggagaaccaccaccaatagcgatcaggtaatccgcgccgctattctggaatacaccgagcccttctttgacgacagtaattgttgggttgggcactacgccgtcgtaaatcgcccatgccagccctgcagcatccatcttatcggtcactttcgccaccacgccgcattgcaccagcgttttatcggtgacgatcagcgccttctgataaccacggcgtttcacctcatcggttaaagccccaacagcaccccgaccaaaccatgccgtttcgttcagaatcattctgttagccatcatccttctccttgttgctttacgaaattactcttcaattcgtaacccataggttttgaatttctccagcactacggcaatctcttcatcgctcagcactggcaccgggtccgtaatcgccagggtcgtcaggtaaagttgcgccagcacttcaacttcatgcgccagccataacgctttttccagattcacctcacaagcgataagcccatgatgttgtaacaaagttgccttacgatttttgagagccagcgcaacatgttcagaaagttcgcgtgttccaaaggtcgcataaggcgcgcaaggaatagaattaccgccagccgccgcaatcatgtagtgaatagcggggatgcttcggttaagaatggaaactgccgtgcaatgaacggcatgattgtgaacaaccgcgttggcatccggtctgctttgataggctgccatatggaaacgccattcgctactggggagctttccttcctcatgtttaccgttgccatcaataaagacaatatggctctccgtcagtttttcatatggaatgcctgtaggcgtaatcagcatcccatcctgataacgtacactgacgttccccgctgtcccctggttcagtcccaggcgggtcatttccaggcaagtgtcaataatctgacgagcaagtttatttcgttccattagctacctctctctgattcaaaacagggcaataatgttgttcctttcacactattgaattagccgtttaattacccaccatcttcttcctgattaacaagaaagaaattcacaagcttatattttgtgacctggttcaactaatcacagtaaataactgcaagttctctttttataaccccattaaaaatgaccgctcttaaaaatatttatcaaaacggtcatttttctattcctccaagcccggaatgaccgttttcggcacaaacaattaatacggtcatctgatttgtgttttttatgatttattttctgaaacgggcatgaaatttcgattattaaagtgatggtagtcacataaagtcaccttctagctaataagtgtgaccgccgtcatattacagagcgttttttatttgaaaatgaatccatgagttcatttcagacaggcaaatattcactgatatgaagcccgaactcgctggttttgcacttttgaaaacataaccgattacgtgcttaagcttctgaacctaagaggatgctatgggaaacacaagtatacaaacgcagagttaccgtgcggtagataaagatgcagggcaaagcagaagttacattattccattcgcgctgctgtgcagtctgttttttctttgggcggtagccaataaccttaacgacattttattacctcaattccagcaggcttttacgctgacaaatttccaggctggcctgatccaaagcgccttttactttggttatttcattatcccaatccctgctgggatattgatgaaaaaactcagttataaagcagggattattaccgggttatttttatatgccttgggtgctgcattattctggcccgccgcagaaataatgaactacaccttgtttttagttggcctatttattattgcagccggattaggttgtctggaaactgccgcaaacccttttgttacggtattagggccggaaagtagtggtcacttccgcttaaatcttgcgcaaacatttaacagctttggcgcaattatcgcggttgtctttgggcaaagtcttattttgtctaacgtgccacatcaaagccaagacgttctcgataaaatgtctccagagcaattgagtgcgtataaacacagcctggtattaagcgtacagacaccttatatgatcatcgtggctatcgtgttactggtcgccctgctgatcatgctgacgaaattcccggcattgcagagtgataatcacagtgacgccaaacaaggaagcttctccgcaagcctttctcgcctggcgcgtattcgccactggcgctgggcggtattagcgcaattctgctatgtcggcgcacaaacggcctgctggagctatttgattcgctacgctgtagaagaaattccaggtatgactgcaggctttgccgctaactatttaaccggaaccatggtgtgcttctttattggtcgtttcaccggtacctggctcatcagtcgcttcgcaccacacaaagtcctggccgcctacgcattaatcgctatggcactgtgcctgatcagtgccttcgctggcggtcatgtgggcttaatagccctgactttatgcagcgcctttatgagcattcagtacccaacaatcttcagcctgggcattaagaatctcggccaggacaccaaatatggtagctccttcatcgttatgaccattattggcggcggtattgtcactccggtcatgggttttgtcagtgacgcggcgggcaacatccccactgctgaactgatccccgcactctgcttcgcggtcatctttatctttgcccgtttccgttctcaaacggcaactaactgaacatattttccgaataaagtgaggaatctgtaatgaaaaaaatcagcttaccgaaaattggtatccgcccggttattgacggtcgtcgcatgggtgttcgtgagagccttgaagaacaaacaatgaatatggcgaaagctacggccgcactgctgaccgagaaactgcgccatgcctgcggagctgccgtcgagtgtgtcatttccgatacctgtatcgcgggtatggctgaagccgctgcttgcgaagaaaaattcagcagtcagaatgtaggcctcaccattacggtaacgccttgctggtgctatggcagtgaaaccatcgacatggatccaacccgcccgaaggccatttggggctttaacggcactgaacgccccggcgctgtttacctggcagcggctctggcagctcacagccagaaaggcatcccagcattctccatttacggtcatgacgttcaggatgccgatgacacaagcattcctgccgatgttgaagaaaaactgctgcgctttgcccgcgccggtttggccgtcgccagcatgaaaggtaaaagctatctgagcctgggcggcgttagcatgggtatcgccggttccattgttgatcacaacttctttgaatcctggctgggaatgaaagtccaggcggtggatatgaccgaactgcgtcgccgtatcgatcagaagatttacgacgaagccgaattggaaatggcactggcctgggctgataaaaacttccgctatggcgaagatgaaaataacaaacagtatcaacgtaatgccgagcaaagccgcgcagttctgcgcgaaagtttactgatggcgatgtgtatccgcgacatgatgcaaggcaacagcaaactggccgatattggtcgcgtggaagaaagtcttggctacaacgccatcgctgcgggcttccaggggcaacgtcactggaccgatcaatatcccaatggtgacaccgccgaagcgatcctcaacagtagttttgactggaatggcgtgcgcgaaccctttgtcgtggcgaccgaaaacgacagtcttaacggcgtggcaatgctaatgggtcaccagctcaccggcaccgctcaggtatttgccgatgtgcgtacctactggagtccagaagcaattgagcgtgtaacggggcataaactggatggactggcagaacacggcatcatccatttgatcaactccggttctgctgcgctggacggttcctgtaaacaacgcgacagcgaaggtaacccgacgatgaagccacactgggaaatctctcagcaagaggctgacgcttgcctcgccgctaccgaatggtgcccggcgatccacgaatacttccgtggcggcggttactcttcccgcttccttaccgaaggcggcgtcccgttcaccatgactcgtgtcaacatcatcaaaggcctgggaccggtactgcaaatcgcggaaggctggagcgtggaattgccgaaggatgtgcatgacatcctcaacaaacgcaccaacagtacctggccaaccacctggtttgcaccgcgcctcaccggtaaagggccgtttacggatgtgtacagcgtaatggcgaactggggcgctaaccatggggttctgaccatcggccacgttggcgcagactttatcactctcgcctccatgctgcgtatcccggtatgtatgcacaacgttgaagagaccaaagtgtatcgtccttctgcctgggctgcgcacggcatggatattgaaggccaggattaccgcgcttgccagaactacggtccgttgtacaagcgttaatacattactccctgatgtgatgcccggtcgctccggctaccgggcctgaacaagcaagagtggttagccggataagcaatgttatccggctatattgcaggagcgattatgaaacaagaagttatcctggtactcgactgtggcgcgaccaatgtcagggccatcgcggttaatcggcagggcaaaattgttgcccgcgccagtacgcctaatgccagcgatatcgcgatggaaaacaacacctggcaccagtggtctttagacgccattttgcaacgctttgctgattgctgtcggcaaatcaatagtgaactgactgaatgccacatccgcggtatcgccgtcaccacctttggtgtggatggcgctctggtagataagcaaggcaatctgctctatccgattattagctggaaatgtccgcgaacagcagcggttatggacaatattgaacggttaatctccgcacagcggttgcaggctatttctggcgtcggagcctttagtttcaatacgttatataagttggtgtggttgaaagaaaatcatccacaactgctggaacgcgcgcacgcctggctctttattagcagcctgattaaccaccgtttaaccggcgaattcactactgatatcacgatggccggaaccagccagatgctggatatccagcaacgcgatttcagtccgcaaattttacaagccaccggtattccacgccgactcttccctcgtctggtggaagcgggtgaacagattggtacgctacagaacagcgccgcagcaatgctcggcttacccgttggcataccggtgatttccgcaggtcacgatacccagttcgccctttttggcgctggtgctgaacaaaatgaacccgtgctctcttccggtacatgggaaattttaatggttcgcagcgcccaggttgatactagcctgttaagtcagtacgccggttccacctgcgaactggatagccaggcagggttgtataacccaggtatgcaatggctggcatccggcgtgctggaatgggtgagaaaactgttctggacggctgaaacaccctggcaaatgttgattgaagaagctcgtctgatcgcgcctggcgcggatggcgtaaaaatgcagtgtgatttattgagctgtcagaacgctggctggcaaggagtgacgcttaataccacgcgggggcatttctatcgcgcggcgctggaagggttaactgcgcaattacagcgcaatctacagatgctggaaaaaatcgggcactttaaggcctctgaattattgttagtcggtggaggaagtcgcaacacattgtggaatcagattaaagccaatatgcttgatattccggtaaaagttctcgacgacgccgaaacgaccgtcgcaggagctgcgctgttcggttggtatggcgtaggggaatttaacagcccggaagaagcccgcgcacagattcattatcagtaccgttatttctacccgcaaactgaacctgaatttatagaggaagtgtgaaatgctgaaaacaattagcccgttaatttctcccgaactattgaaagtgctggcagagatgggacatggagatgaaattattttttccgatgctcactttcccgcccatagcatgggaccgcaggtgatccgcgctgatggcctgttggtgagcgacttgctccaggcgattatcccgttatttgaactggacagttatgcaccgccgctggtgatgatggcggcggtagaaggtgacactctcgatcctgaagtagaacgacgttaccgtaatgcgcttagtctacaagccccgtgtcctgacatcatccgcatcaatcgttttgcgttttatgaacgggcgcaaaaagcctttgcgatcgttatcacaggcgaacgagcgaagtacgggaatattcttttaaaaaaaggggtaacaccgtaatctcataccggtacgcccgcatgacgcgggcggttatcgaatgatggggtgaaaaatatgaaagcggcacgccagcaagcgatagtcgacctgctgctgaaccataccagcctgaccacggaagctctctctgaacagctaaaggtcagtaaagaaaccattcgtcgcgatctcaatgaattacagacgcagggtaaaattctgcgcaatcatggacgcgctaaatatatccaccgtcaaaatcaagacagtggcgatccctttcacatcaggctgaaaagccattatgcgcataaagcagatatcgcgcgcgaggcgctcgcgtggattgaagaagggatggtgatagccttagacgccagtagtacttgctggtatctggcacgccagttgcctgacatcaacattcaggtcttcaccaatagccatccgatttgccatgaactcggtaaacgcgaacgcattcaactgatcagttccggcggcacacttgagcgcaaatatggctgttacgtcaatcccagcctgatttcccaacttaaaagcctggaaatcgatctgtttattttttcttgtgaagggatcgatagcagcggcgcactgtgggactccaatgcgatcaacgctgattacaaaagcatgctattaaaacgtgccgcgcaaagcttgttattgattgataaaagtaaatttaatcgtagtggggaagcccgcatcgggcatctggatgaggtaacgcacattatttctgatgagcgccaggttgcaacttctttggtaacagcctgacggaaagggtagcaggccggagacgacgccccggccttgcctgttatcgctcgtcgcgacgaccacccaccgcagcccagatgcggcggacgtgcaccgtcacttcttcgcgatcgtgatacaactgccgcgcctgaatctgagcatttatgccatgttcatcaagctgtgcctgaatatacgccagattgtgactcacttcttcgtagcgttttttcatcggcagtttgaggttgaaaatggtttcacggcaccagccattaaccagccactgcgccatcaatgccgcaactttcgccggtttttcaaccatatcgcataccatccaggagatattgctgcgcgtcggacggaatttgaaaccgtcttcccgcagccacgtcacctgtccggtatccatcagactttgcgccatcgggccgttgtcgacggaataaacccacatgttgcgcttcaccagttggtaggtccagccgccagggcaagcgcctaaatccaccgcccacatcccgttcgccaggcgttcatcccactcatccgcaggaataaacacatgaaatgcctcttccagtttgagcgtggaacgactcggcgcatctgccggaaatttcaggcgcggaatgcccatatagaacgggctattattgttgctgtaactgtaaccggtatagcagcagcctggtgcaataaagaatacatgcacaaccggacgcttcggcgtttcatagttcgccagcaccccggcatcgcgcaaggcagcgcgtagcggaacagtaaatttacggcagaatttcagtaactctttgctttcgttggtatcggcaacttcaacacgcagttcaccgcccttctctactacgccctgtaacatgccgacaatgggggtaatacgatcttctggcggcaaatgctgcaggagttcccccaccacaaaccactggcgggcaaaaattaaactactgaacggcagctcacggattaacttatcgccatcatcaggttgataacattcataaatgacataacccgcattctctttcacgcgggcaaaaccgaaaatttcccgctggccggctttatcggtaatttctgcggcgcactctttttcaaagcccggacggcacagcaatacaaccttattcatgacttacgcccttgcgctttaaacggatagcaccaactaacattaacgcccagcccgcgaggaagctcacgccgccaaccggagtgacaaacgcccacaaacgcagatgggacagcgccaggcaataaaggctgccgctgaacaacaccgtgcctaacgcgaggaaaacgctactccagtaaaaccagatactgatgcgacgctgcattgccaccgccagacctaagatcgccagcgtatgaaacgcctggtattcgaggccggtctggatccagcccatctcaacggcccccatggttttacttaacacatgcgcgccaaaagcgcccagagccacaaaaatgaagccgctaatggcggcgaaaatcagcataaaacggctggtcatggtcgtaccctacgtaaattattgttcataacgaaagcggaatttttcttgttcagcagcggctttcgccaggatccattggcgaaaggcggctattttacccagttctgcctgactgtcatgacaaaccagataaaaagcatttttactgaccagaacatcattaaacgggcaaacaagacgtccggcctcgatttcagattgcgccatcacgttatttgccagcgccactccctgcccgtggatagccgcttgcagcaccatggcgctatggctaaaaattggcccttgctgaacgttgatatgatttaaccccaactgtcgggtatatgtctgccagtcacggcggctagcatcatgtaataacgtatgtttagccagatcttccggtgtcttcaagggtttttcgccagtcagcagtagcgggctacacaccggcaataaatattcggcgtacagtttttccacccgtagccccggccagttgccccgaccataaaatatcgccacatcaacatcatccgccagcttatcttcctgacgatcaaccgcctggattcgaacgtcaattcccggataagcactattaaagctggaaagtcgcggaaccaaccaatgaatggcgaaactggggagtaaactgaccgtcaacgcccccttggcgctacgggcctggagtttacgcgtcgcttcggttaattggctaaatatctctttgatatcgaggaaatagctttgcccttcctcggtcagcaggagactacgattacggcggcggaacagttttagccccaaaaaatcctcaagagacttgatttgatgacttactgcggcttgggtcacaaaaagctcttctgctgcgcgagtgaaacttaaatggcgtgctgcggcatcaaaaactcgtaaggcatttagcggtggtaatcgtttagacatggctattaaactttgatgttaaatgaatttaacaattagatcacactatgtaacctattagtttttttaatctgagccattataaattgtccgttgagcttctaccagcaaatacctatagtggcggcacttcctgagccggaacgaaaagttttatcggaatgcgtgttctggtgaacttttggcttacggttgtgatgttgtgttgttgtgtttgcaattggtctgcgattcagaccatggtagcaaagctaccttttttcacttcctgtacatttaccctgtctgtccatagtgattaatgtagcaccgcctaattgcggtgcttttttttaccttgcgatcgcgaattactgatccagttcgaccatctctttcacgtcagtacggttgatctgctgtttgttgccattagcgtctttatagctaatcataccggtatcgttatcagtctgtggtttgccgtcagagacgatggtacgtccgtcattggtgtgcatcacatagttgctaccggaacaggcgctcagggcaaaagtcagcatacaggcagaaataattgcggcagtctttttcatcatcttctccttaaagcgattaataaatcttaatagtattgattaacaggctaaaattaacgcctaacactattcagcatatgttacttacgcggcttcgccaggatatccagataattctgatggttagcactctccttgtatcaaagtgaattttgcgtcacgatcggtgcatcaagccgaggagtaccatgaacgtttttaatcccgcgcagtttcgcgcccagtttcccgcactacaggatgcgggcgtctatctcgacagcgccgcgaccgcgcttaaacctgaagccgtggttgaagccacccaacagttttacagtctgagcgccggaaacgtccatcgcagccagtttgccgaagcccaacgcctgaccgcgcgttatgaagctgcacgagagaaagtggcgcaattactgaatgcaccggatgataaaactatcgtctggacgcgcggcaccactgaatccatcaacatggtggcacaatgctatgcgcgtccgcgtctgcaaccgggcgatgagattattgtcagcgtggcagaacaccacgccaacctcgtcccctggctgatggtcgcccaacaaactggagccaaagtggtgaaattgccgcttaatgcgcagcgactgccggatgtcgatttgttgccagaactgattactccccgtagtcggattctggcgttgggtcagatgagcaacgttactggcggttgcccggatctggcgcgagcgattacctttgctcatagtgccgggatggtggtgatggttgatggtgctcagggggcagtgcatttccccgcggatgttcagcaactggatattgatttctatgcttttagtggtcacaaactgtatggcccgacaggtatcggcgtgctgtatggtaaaagtgaactgctggaggcgatgagcccctggctgggcggcggcaaaatggttcacgaagtgagttttgacggcttcacgactcaatctgcgccgtggaaactggaagctggaacgccaaatgtcgctggtgtcataggattaagcgcggcgctggaatggctggcagattacgatatcaaccaggccgaaagctggagccgtagcttagcaacgctggcggaagatgcgctggcgaaacgtcccggctttcgtagtttccgctgccaggattccagcctgctggcctttgattttgctggcgttcatcatagcgatatggtgacgctgctggcggagtacggtattgccctgcgggccgggcagcattgcgctcagccgctactggcagaattaggcgtaaccggcacactgcgcgcctcttttgcgccatataatacaaagagtgatgtggatgcgctggtgaatgccgttgaccgcgcgctggaattattggtggattaatgacaaacccgcaattcgccggacatccgttcggcacaaccgtaaccgcagaaacgttacgcaataccttcgcaccgttgacgcaatgggaagataaatatcgccagttgatcatgctggggaaacagcttccggcattgccagacgagttaaaagcgcaggctaaagagattgccggatgcgaaaaccgcgtctggctgggatatacagtggctgaaaacggcaaaatgcatttctttggcgacagcgaagggcgcattgtgcgcggcctgctggcggtgttgttgactgccgttgaggggaaaaccgccgccgagttgcaggcacagagtccactggcattgtttgatgagctgggattacgtgcgcagcttagcgccagtcgcagccaggggttaaatgcgttaagcgaggcgattatcgctgcgacgaagcaggtttaagcacagaaccgggtcggataagacgttcgcgtctcatccgacctgattgtttaaccctgacgcgccgctttcgccatcatcttcttcagcgcatgagaaaccgcaacaaacccaaaggtggcggtcaccatcgttgccgcgccaaatccagatgcacaatccatccgcttcggcccttctgccgtggctttcatcgcacacaccgtaccgtcactctgcgggtacaccagcgcttcagtagaaaacacgcaatccacgccgagcttacctttactgtttttcactacgccaaaatcgcttttcaggcgctcgcgcaacttcgccgccagcgggtcctgaatcgttttcgccagatcggtaacctgaatctgcgtcggatcaatctgcccacccgcgccaccggttgtgaccagtgggattttattgcgccgacaataagcaatcagcgccgctttgggccgtacactatcaatggcatcaatcacgtagctataacccacgctcatatactgcgctacgttatccggcgtcacgaaatcatccaccaccgttacacggcactccgggttaatctggcgaatacgctccgccataacttccgcttttgccagcccaacgttatcgcgcagggcatgaatttgccgattggtattggtgacgcacacatcatccatatcgataagcgtgattgcgccaatccccgtgcgcgccagcgcttccgccgcccaggaaccgacaccaccgataccaaccacacaaatatgcgcgtcagcaaacagttgcaacgctttttcaccatacagacgcgctgtgccaccaaaacgctgacgccatgcatcactaattaccacagacatagcacctcagaattaaaaagggcgaggttatccctcaccctaaacgcataaatgcctgatgcgctacgcttatcaggcctacataactcctgcaatattttggatttgcatgatttgtaggccggataaggcgttcacgccgcatccggcatgaacaacgcgcacttagtcaataatcaggatgtgaggttacccctcaccctgtcatatccgtaaaaacggcatacagaatatcacatcagccgctaaagacgttacctgcgcccggggcggttttcagcacccagacacgtccatagtggttgtaccaacctgcgcggtgtccggcttccggcccgatcccttgatagatatcgaagtgttggcctttgattgcaccaccgacatccagcgccaccatcagacgcagttcgtactgaccattaaatttgccgttattatccagcaacggcacttctgccagcaaggtagtacctggcggaataatggaacgatcagaggcaacactcgcgcgaccaaccagcggcaccgcacttgcccctttcaccggagcaaaagattgcggtttaaagaagacgaaagacgggttctgttccagcagctcgcgaacctcggcttcactgtgtgtttcgccccagtgacgaatcgcctgcatgctcatatcttcttttttcacttcgccacggtcgatcagcaccttaccaatgctgcgataggcatgaccgtttttccctgcatagctgaaaaagttaagcggactgccatcaccaaagtcgatatacccactaccctgcacatccataatgaagttatccatcagggagttactgtaagcgagaatatatttatcactcaatgcccccgcgtagatctccgcacgagacggcagacgaccacgttttggcggcatacggtaaataggatactggaactcgccctggcgggtatggcgcgcctgaattaccggcgtgtaataaccggtaaactgcacgttaccatagttgtcggcaccttccatctgccaggcatcaatgccgaactggcgcatattgcgggtatcaccgcctgcgcgcagccactcttgcaccgcgttataaacattactctggttgccatacagacgcggactgctattacggatatggttaatttgctcggcaaaatcaccggcgttaatcggcgcgccaacggcatctggctggttcaccagagagaaaggctgggtaaatttcccgtctttatattgctgtccgcgatcggttggtttggaagagcaggcggcaagcattgccacaaccgtgcccataagaaggtactttacccaacgtcctttcattgttctcttcttcaggttaaaaaataaggcgcaacgaagataacaaaccgccgcgtttaatgaaatgagcagcctctccctgacgcaaattttgcacaaaaaataggctttagtgatttgtttttgttcaaaatcatgccaaatccgtgatcggggtaaaaaaaaggttgcatgaaaacgcgagcggagtatagtgcgcatccacggacgcggggtggagcagcctggtagctcgtcgggctcataacccgaaggtcgtcggttcaaatccggcccccgcaaccaattaaaatttgatgaagtaaagcagtacggtgacgcggggtggagcagcctggtagctcgtcgggctcataacccgaaggtcgtcggttcaaatccggcccccgcaaccaatcaaatttgatgaagtaaaagcagtacggtgacgcggggtggagcagcctggtagctcgtcgggctcataacccgaaggtcgtcggttcaaatccggcccccgcaaccaattattgaacaccctaacgggtgtttttttgtttctggtctcccataaaaaagcgccattcagcgcctttttatcatccccttctcgccagcgtcgccccatcggcaaaatacgctttaatccccgcaagaatagactccgcaacttcctgctggaaagtcgccgttttcagtttacgctcttcctcaacgttactgataaacgccgtttcgaccagaatggagggaatatctggtgcctttagtacggcaaacccggcctgttcaacttgatttttatgcagcttgttgattttaccgagcttattcagtaccgctttaccaaacttcaggctgtcggcaatggtcaggctctgtaccatatcgaacatggtgtggtcgacatagcggtcaccgcttttgctcacgccaccaatcaagtcgctggcgttctgggtttgtgccagatattttgccgcagtactggttgcacctttggtactgagcgcaaacacagaggaaccgctcggctgacgactggtaaaggcgtcggcatggatagagacaaacaggtcagcacgctgtttctgggcttttgctacgcgcacttgcaatggaatgaagatgtcttcattgcgcgtcatgtacaccttcatattgccctctttctcgatcagagagcgcaaacggcgagctatttgcaataccacatctttttcgcgcgttttgtatttccccaccgcaccggagtcttcgccaccgtggccagggtcaagcataatgacaatcggacgatcgcgccctgctttacccggttgtggaccactttgcgctggcggcacctgcttttcgaggtcgcctttgttgtaatcctccagcagcgccagcagcgggtcctgcatatcctgtgcattggccggatagaggtccatcaccagacgctctttaaacccggcgaccggcgcaagggcaaacagctgcggttttacgttttgctttaattcaaaaaccatccgtacggtttgcgggtcaaattgcccgacgcgcgcgctcttgatgaacgggtcgtctgcacgaatttgtgccgccatccccttgagtacgctgttcaggtttacatcttcgatatccaccaccacgcgttcagggttactcaacgcgaactgcttatatttcagctgacgattactttccaccgtcacgcgggtgtagctggacgcaggccagacgcgcaccgccacgacctggctgaccgcagccagactgacctgacttacgctcaatagccacatggcacccgcgccttgcagtaaacgacgacggctgattgcagtgttggatccactcatgcctctcccgagcaaaagaaatctaagctgtgtaacaagtaaacgactaatttgaccggaaactttagcgaaagacgcataatctgtcatctaataaacggtaaacattctttttatattcacggcattactgataaaaaagtcgctctcgcataaaatttacacttgcaccctgcgaaaaaacagaataaaaatacactaatttcgaataatcatgcaaagaggtgtgccgtggtaaaggaacgtaaaaccgagttggtcgagggattccgccatagcgttccctatatcaatacccaccggggaaaaacgtttgtcatcatgctcggcggtgaagccattgagcatgagaatttctccagtatcgttaatgatatcgggttgttgcacagcctcggcatccgtctggtggtggtctatggcgcacgtccgcagatcgacgcaaatctggctgcgcatcaccacgaaccgctgtatcacaagaatatacgtgtgaccgacgccaaaacactggaactggtgaagcaggctgcgggaacattgcaactggatattactgctcgcctgagcatgagtctcaataacacgccgctgcagggcgcgcatatcaacgtcgtcagtggcaattttattattgcccagccgctgggcgtcgatgacggcgtggattactgccatagcgggcgtatccggcggattgatgaagacgcgatccatcgtcaactggacagcggtgcaatagtgctaatggggccggtcgctgttagtgtcactggcgagagctttaacctgaccagcgaagagattgccactcaactggccatcaaactgaaagctgaaaagatgattggtttttgctcttcccagggcgtcactaatgacgacggtgatattgtctccgaacttttccctaacgaagcgcaagcgcgggtagaagcccaggaagagaaaggcgattacaactccggtacggtgcgctttttgcgtggcgcagtgaaagcctgccgcagcggcgtgcgtcgctgtcatttaatcagttatcaggaagatggcgcgctgttgcaagagttgttcagtcgcgacggtatcggtacgcagattgtgatggaaagcgccgagcagattcgtcgcgcaacaatcaacgatattggcggtattctggagttgattcgcccactggagcagcaaggtattctggtacgccgttctcgcgagcagctggagatggaaatcgacaaattcaccattattcagcgcgataacacgactattgcctgcgccgcgctctatccgttcccggaagagaagattggggaaatggcctgtgtggcagttcacccggattaccgcagtagtagtaggggtgaagttctgctggaacgcattgccgctcaggcgaagcagagcggcttaagcaaattgtttgtgctgaccacgcgcagtattcactggttccaggaacgtggatttaccccagtggatattgatttactgcccgagagcaaaaagcagttgtacaactaccagcgtaaatccaaagtgttgatggcggatttagggtaagcgatgaaaatcgtcggatgcgacatgcgtaacactcgtacgtcgcatccggcaattacgtttattcccgactactaaacaacgccgccagaccactgcgccgctcagtacgagtggcgattgccgcacttaatatgcgctcatcggcatacaggctcagacggcgacgcgcgcgggtcaccgcggtataaaccagctctcgcgttactaccggcgtgcgttggctcggcaaaatcaacgccgcatggtcgaactcgcttccctggcttttatgtaccgtcatcgcccacgtagtttcgtgctctggcaagcgactcggttgcacagacttaatattgccgtccggcatcgcaaaccagacgcgcgtcccctgcccgcgatccagcgcaataccgatatcgccattaaacaacccaagcgcgctgtcattacgggcaatcatcaccggtcgaccttcgtaccaacgagagtgcggatgacgatgaattttgcgcttctgttgcataaactgctcaattcgctcattcagtccagccacgccaaacggcccttcccgcagggcgcacaaaagctggtactcattgaacgcctgaatgattaaatccggctcggcacgcgcttgcagcagatccagataacgtccgtaacccgcaagagcttcctcaagcatcgcaatataatcttcgccgctctgtaaaagccgtttttcgatatcagtaaaatcctgctgaaaaacggttttcactgccgttttatcaccacggttgatcgccgcagctaactgaccaatgccagaatcgctgccgaaacgatagcttttttgcagcaggcagagactgtcgcgcaaagatgccgcttctgtgccggttcctgccggaacgtgagtccccgtcaggcggcttagctgcctggcacgctcggcggtaaagcccgcgttggcataagcgcagatatcgcccagcacagccccagcctcaacgctggccagttgatcacgatcgccgagaaagatcactcgcgcatgatcgggcaaggcgtcgatcagtctgctcatcataggcagatcgatcatactcgcttcatctaccaccagcacatcaagatgcagcgggttaccggcatgatgacgtaaacgctggctacccggctgcgcgcccagcaatcggtgcaaagtgctggcatcttccggaatgcgtttcttttgttcatcggtcagcggtaactgtcgcaaagccttgccgagagattcggttaagcgcgcggcagctttacccgttggtgcagccagacggatacggcagcgttcgccgtcggccatttgaattaacgctgccagcaacttcgctacggtggtcgttttaccggtgccagggccgccggaaatcacgctgatccgccgcgtcagcgccactgccgccgcaactttttgccagttaatttcatcgcttactggaaaaagtttgtccagggtttgcgccagtagagcttcatcaacctcaatggcatgattcacttcgttgaaaaagcgtgccactgtgcgctcgttacaccacatgcgattcaaataaagacgatcgccacagaggatcatcggcgtgggttcatctcccctgctgaccgcttgagaagccagcaagcattcttcccaattttgtagctcaccgatttcactgacacaggtcgccaacagcggatggctcgcctcgttattttccagtcgactaagcggcaaacaaacgtgtccctctccggcatcatgacttaacagtgccgccgcgagggtgacggcaggatgttcatctcccgccacggtcagggcaaattgcacatccagcgggcgtagctgtttgtgctccacagcttccagtaattgcttttgcaatttcattacgcctcctccagggtcataccggcaaacatctcatccatcagggcaatcaacccggcgttgggtcgggttgtgtaaatcccctgttgcggatgttctttatcaacgccacgcaggaacagataaataacgccgccaaagtggtgctcatagtcgtaatcagcaatgcgatggcgcagataacgatgcagcgccagggtataaagctgatattgcagatcatagcggtgtgcctgcattgccgctgccatagcctgttgggtgtaagcgctactgtcttcacccaaccagttggatttatagtcgagcaggtaataacgcccttcgtggcggaacaccaggtcgataaagccttttaacatgccacgtacctgcatgaactccagcggcgggcagcctgcggatagcgggtcaaactggcggattaacgtatcaagctgactggcgataagcggttcactaatcggcagataaaactccatctccacctgtttattgcgggcggaaagttgactcaggcttacgccggtttcattgagaggtgcctggaggacagccgtgatccactcggtcaataccggttcccactggctttcaaagccgccgagttccagtttttcccgcacccagttcgggtcaaccggctgggtaaaatccaggtcttcaaacaaactgtgcaagaacgtccccggactcgcaccgcgcggaaactgatgtggtgttaacgtcggttcttcaacgacgctggcaacgcctgcagcatcgacatccagccgaggcatcaaatcctgggcgataccgtgaccacgctgttgcaaaccagagtagctggtgacgcgccagttatcgccgggcaatcgttgtaacgtcttcgcattcagctctgctgtagaaacatcattaacctgccagggttggttatcaccagtttgtgccgtttgccaggcaatatcatcatcgcataacgcttcaatacaggtgcgaagccctgccgcatcttgcggttcccctttttgcagcaaacgcccgagcgcactttggtggacgtcggtgtcaccttttttatcgccacgacggcgcaccagcggtgcaacgccgagactgcaatgccaaacgctacgtgtcagcgccacgtaaagcaaacgcagatcttccgccagacgttcggcctccgcgaggtcgacgctttctggcgcagcattaagatccagaactgcctcaaagctgtggcgatcgtgataaaacgcctgctcctggacgcggaaattggtgataaacggcagccagaccaatggatattccagccctttgcttttgtggatcgtgacaatctgcaccagatgtttatcactttcgagacgcatttgttggctggaggcattactgtctggctcgaggatatgttggcttaaccagcgtaccagcgcatgttcactttccagctgcgttccggcttcttgtagcagttcgctgatatgcaagatatcggtaagacgccgctcaccgcctgccgttgccagcaagttttcagcaatgttacgcgcgctcatcagcgcccgcagcatcggcataacgccacgtttgcgccagatttgccgataaccatcgaactcttcgactaccacatcccacgcatgttcgtcattgttcagcgtttcgatatccagcgcgttcagccccatcatactcgttgccagcgcactacgcagggtgttctcacgttcgggcgtcatcaccgcctgcaacaaccaaagcatttcctgcgcttccagagtttcaaaaacactgtcgcggttgctaaggtaaacggaagggatttccagcaacgttaaggcatcgcgcacctgggcggcctcctggcggctgcgcaccagcacactgatgtcgctagcacgcaccggacgcgcgtcgtcgccgttcatcagcaacgcttcgccccgctgtccggcttgtagccagtcgcggatttgcgcagcacatacctgcgccatggtactttgataatcgccaacgccgcagctttcgccttccatcagccacattttcatcgcaggctgtgtttcacctttaaatacaaaacgtaacgcctgatttttcccggcacttttcactggaataaacggtatttcgcgaaacatgaacgcgtcatcagtctggctgaaaagcttattcacgctgttcaccattcctggtgcggaacgccagttggtgtctaaagtgtagtgggcgtgaacttcgctacgcgccttcatataagtgaagatatccgcaccccggaatgcatatatggcctgcttcgggtcgccaattagcaacaatgcggtttccggctgatggtgccagatacggcgaaaaattcggtactgctgggggtcggtatcctgaaattcatcgatcattgccaccgggaatcgcgtacggatcgccgctgccaacacctcaccgctttcgctacgcagcgcggaatcgagccgacttaacatgtcatcaaaacccaattcgccacggcggcgtttttcacgcgctactgtttcgcggatctcagccaatgcgcgggtgatcaccagatcgcggatgctcaatggttctgcaagcagttgatcgatcgcctcaaacagtggatgtcgcggggtttcccccccggccttcgtgcgatcttctaagaaacgctgggagaatttttccaggctctccggcaactgataactgtttgtctcttcttctgcccaggcgctgatcttgtcgatccatttagcctgattgctacggttaaacttgcgtcgatcaataccagaagattcgatcagcgcatccagttcacccactgcgtcgcgccactgctgttttaccgtatcaatacgcgccacaatttgcgcgtgacgggaagccagcgtttcatcatcgggcggcggtgctttgataaccggcgcttcgccttgcagataacgattaatatcgcgcagcaacgcctgcggccctttccaggtttcaaagacgacctgggctatttcacgcggcagcgggtagcagtggcgacgccagaaatcggcgcaggcctggtagcgtagcagagactcatcttcaatcagctgctgctcaaacagcatgccggattcaaaggcattcaggttgagcatgcgctggcaaaagccgtgaatagtaaagactgccgcttcatccatctgccgttcggctaacaacaaccactgcgcggcttgcgctttatcgtcgatctcttccagcaggcgttcgtacagtggattgtcggtggtttcacgcagacaggcgatgcgcaactcgtggatattgctacggatacgaccgcgcaattctgccgtggcagcctcggtaaaggtgaccaccagcagttcttcaacggtcagcgggcggggaaaggcggcggaaccgcctagtccaagtaacaggcgcaaatagagcgccgcaatcgtaaaggttttgcctgtgccggcagaggcttcaatcaggcgctcaccctgtaagggcaagcgcaaaggatctagtgtctcggcgacatcactcattcttttcactcatcaggggcattgtttgctgcaacgcgctgacgttctcccacactttccagccttcagggtgtacatattcggctttcccgttctggctgccggaaatctggctcagaatagccatgccttgcggctcgaccaccgcctgatggaagaaatcagcaagtttttgcggcgtcagcagttttatctgggccacgattttatcacggctatcgaagcgcatattgccgcgatcgaaatctttacttaacttgcttgcttcttcgccgagcgtttgcggtgcctgcagcatctgggtaattaccgcctgctggatttgcgcaaactcatctggcttcatcgctcgcaattttgcctctgcggttgggaaaaacgccttgtaacgctcccacaagaaactaggctgtttatcattgctttgcaaaaggaagcccatgccccactgacgccccacgctcattggaaacgcaaacacggcatagcccaattgttcttcggtacgcaactgattgtagaaccacggctgtacgatctgccccaacagagagctataggcactgctggtgtattcatcgtagccagtcggtacaaataccgctgccagtgcggagtcggtgctgttaccggctttttcaaagatgacggattgttttttatcgaccactacatctttgtttcgacaccactcactaccatcagcgcccaactgtttttgcacatcgcgtgccagcgttgttgcctgggcctcggtcatgttgccgataaccataaactctggtcgagccccactttttaaggcgtcgcgataggccagcacctctttcaacgtaatggagggcaaaattttacgccgttcatctcggctgaagtacggcacttggctgagcatctgcgcgggcataatcgcctgctcaaacgctttacccttttctgcggaatccatcatctggttataccaggacttcgcctgctcaagctgatcttccgtagcggtatagctaaagtacccctcgagcaatgcctggaacagctgcggcagacgctgggtgtaaccattagcattaaccataaggccgttgttagcgttggtggaaaaacttatgccaccaacgctcgcctggttgcttaactgatcaagcgccagccctgcgagataatcattgagcgcaaacatcacctgattgcgggcgctgtccatggctttcggattacgcaaaatcaggctgacatcagctttgggctcgctggcaaaataacggcttggcgcatacaccacgcgcagattgctctcatcaacaatcagctctggatggtcgtatttcttctcactcttaatcaggctgaaatcatcaggaatataagggttaagctctggcaaagagagcgcaatgtcggcggcttttttctgccagtcggcgaaagtttgtgcgctgattttatcgacctgatacggcgcatcgacaaagtaagccgttttgttgtgcggctctttcgggctgatataccagatacgcgcattctgcggcgtcatcatcgccagacgttcctttactgctttagcatcgtaccgatcggcaatattgactgcatccagcgtatgctcaacaggaacgcgaatcatggtatctgccagccattcgacgtaatccatatcacgggtgatgctcggataacggaagtcgatatccagcacattcgccagttcatcgaagtattgtttatcaatgcctttttcacgtaacagattgagatagctaaaaattgccgccacaacctgatcgcgattagccaggcctttatcggttaaagacgcagagatcgctaatacgccgctgttgccgttgacgataggatcggagttggcgctaatgccctcaactaatccctgcttttgcagccagtcagaaagtgtacctgggctgcgattgccaatcagataggtaatcaattcatcggttttactacggaacttcgcactgttgttatcgatgcgaaactcaacgcgcaacactttacgcggcagcgcagggacgtaatgaatgataatgcccttttgcgcgtcggtgactaccggcacggtgatttccggttttttgctctctttgttcggcacgcgaccaaaggtgtccgccgccatttttgccaactccggcagcggtttattactgtaaataaccgccttcatcaaattggcggaatagtacttctcgtggaaatctttcagcgcctgctgcaccggattaccaggtttgtcgcttaaagtttcgaggttaccaccagaaaacttactaccggggtgtgccgggttaatggtttctgcgctgacctgtgccatgcgcatcccgtcacgcgtacgcgccatggttaattcagcgttcaccgcattacgctcacgttcggcatatttcttgtcgagcaaaggttcagcaatagcatcggccaggcggtctaccgcaccaggcaaggcgtcgttctcaacttccagatagaaagccgtgcgatacggcgcagtgctggcattgtgactaccgccgtgcattttgagatattcggccagactgtcagcctgcgggtactttttgctccccatcagactcatatgttcaaggtaatgtgccagcccctggtacgcctcgggatcttccaggctcccaacgggcaccaccagcgcgctgaggcttttaactgcctgcggatcagaaaccagcaagaccaccataccgttatccagacgtatagcctgatactggcggttatctttatcacttttacggatggtttcctgaatcggctgccatcccgtttctgcctgacttaagggtgcccaaagggcaactaacaacaataatgctttgaaccaggtgctgcggggcattcacggacctcataatcaacttaattttctgtccagattcaacacgttaacgcaaatcatctgccagaatttaatcttgtgctgcacgagtcagcctatgtttatataaccatcagtccgtgactggtgcgcatcataaagtaagcggatagattgcgcaatttttatacagcactcaactctgattaaagcgaaacagcggtaacaggaaacgttggctctgttcaacgatggcctccattgtctctggtgttaattgccgccagagcctttgataccagatatcatcaccttcgccacgcaccatcatgttgccttcgtaagcctgaaggaatttcgtacgggctttttgcaacgtggaatcgtcatccagcatggcatcgttttgcgcgtcataacaggtttttagccacgcgccgccactttcaggtaacaccagcaatggcgcggacattccttcacgatacccctcaatcagttgactgaggtaatgcaaagcctgttcggctgcaagcggcggaaaacgccactcgccgtctttgcgtagaaaaaggcgactttcaccattaccaccgctggcacagtagacaaggtgttccagccaaagttgcattccctgggccacacttaataaagagggacgccagcgcaacaggccatccggctgcacctgcggcaaccagccagttatctgcacaccgttgcaggcgagatcaatttccatactctgccccggctggcgacaggcaatgactctgtcggcaagctgctgcatctcctggcactgtgtttcccagaaaatttcaccaaaagcgccatacggtaaatcccctgccgctcggaagcggcggaacaagcgttcggcatcatcctgctcaaccagtgcattcaataactgctgattgatttgataacggctaagtccttccagaataaatggctcggtgtcggggatttcgctgtcttcagtacggaagttcacctgcaaacgcatctggaaaaatgcccgcaccggatgtgcccagaatcgttgtagcgtttccagcggcacggtttccggtaaggtaaacggcagcggctgaacaaattcagaatgtgctttaccagcctggctggccgcaggtagccattcacgagcatagctttgtcgttcgcctggctggtagttttgtggatcaaacggcatccgggtatggaggcaagtaagatgcgcttttacccttgcctcgctttcatcacagttgagcgcttcatcgcccggtagataatgactttgcccgatgtagtcgatcagttcctgcaccagtacgctcgggaaacgctcactgttatcctgaatggaacgaccgatatagctgatatagagtttttgctgcgcggaaattaacgcttccaggaacagatagcggtcgtcatcgcgacggctacggtcgccacgcttcggtttctggctcatcaggtcaaagcccaatggcgcaagctgacgtggataaacgccgtcgttcattcccagcaggcaaaccactttgaacggaatactacgcattggcatcagagtacaaatgttaaccggtccggcgagaaaacgctggctgatacgttcttgatccagacgctgtgccagttcatcacgcaatagactcagcggcaccgcgtcgccatactgcgcacctaaaccttcggcgataatcgcctgccattgttgttcgatcagcgtcatcgccgcttcggtttccgcatccggcaggaagaaggcgttgagcatatcgcgacaaaccggcaaccactcttccagcggacgctcctgtgccagcccgcgacgccagatgtttagctgcattagcagactagccagatgccccaccagttctgcaattaagccgctgctttcatcataaggtagaacgctttgccactcgccctgcgcgctctccatcgcgtagcccaacaacatacgcgtcaggccaaatcgccaggtgtgttgtccggtggcggggagttccagctcgcgaacgttgtcgtcatctatgccccaacgaatgccggattcgttgacccactggcgtaaataacgcagcccttcttcggtgatgtcaaaccgcgccgccagcaccggcacatccagcaacgccagcacatcctcactcacaaaacgactgtcaggcagacttaacaggctgataaacgcttccagtaccggatgactctgccgcgcacgacggtcggaaatggcgtaaggtaggtaacgatccgcaggtgcgctaccaaacacagcctgaataaacggactgtagctgtcgatatcagccaccatcacgatgatgtcgcgcggagtaagtgtcgggtcttcctccagcatcgccagcaggcgatcgtgtaaaacttcaacttcacgctgcgggctatggcaaacgtggaaggtgatactgctatccagtggatcaagcgggcgtttgttatcgctacgggaaaactcttcgatgttcacaccagcaacggcgcggttttccagttccagaatgtcagactgaatgttatgcagcaggttatctggcgtgacatcgacaaaggcgtccagctcctggctgctctccaggtcagaaaggagataaatgtagtcgcgcccaagcttaccccaactagccagcagcgggttgccgacatcctgttcaccatcgctgttaaagagctgcccggcattttcgctatcacgaaatagcggcaattcgcgatcttcaaaactgtgtcgacgctgacgggtcagcagtttcgccagataagcaggatctttaatatcgccccagtaataacggcaggggttggtaaacaggagatggatttcaatatgtttacccagcgcctgtagcgcctggagataaacaggcggtaacgcggaaataccgcatataaagacgcggctaggtaaccccggcgggcaggtcgtcgcggactccagcgtttcgataaagcgctgatagagattggcgcggtgccagcgcggttgcccgagttgatgggtatattccaccagcgccttccacaacggggcttgccaggcctgtgcttctcccagcccttcaaccaaatgtcctgtttcccactgtgccagccagtccggacgatagaccagatactggtcaaacaggtccgccgctttactggaaagctggaacagttttcgcttgtcgctatcgtcagtcagataatgccgcaacagggtaaagtcttcgcgctccagcaattgcggcagcagagtcatcagtttccagctcatgctctgtttgttaaaggcgctctctttggggatttccggtaacacccggacgaacatatcccagataaagctcgctggcagcggaaaatcaatgtttgccgcaataccaaacttttggctcagggtcatttgcagccactgtgccataccggtactttgcaccagaatcatctctggttcgaaaggatcgtccagccgttcgcgttcgacaataaactccatcaacgcttccagcacgtccagacgattggaatggtagacccttaacatagcggctcctgattactgacgattcgggcaatgcaggcgggtcatctcgccttctctgcccccgggactaactagcgtaacgctgatgctgacacatcccgcctggcttgtctgcattcggttgacctgccagttggcaggtgggctaatcgcgcgcagttgcgtttgctgccagccatgccgccagagctgttggtactggtttctgctggcaagactgttcattaatgttcgctggaaaccgcttaacgcagtgacaatcatcaccatcaacaccatcgccaacattacctccggcaggctaaagccttgttgattcttcagggaagcactcataacgccctctctttcagcggttaaatcagggaagctgacataacgccctctctttcagcggacaaaaatcgctccagccgcgtgggctaaaaacaatgtttccatcaatgacttcgcctgttcgccacaagctaacgccttcataaccggcaatcaataaggcttcattatctgccagtaaacgcaaacaaacctgggcatcggtttcagcgtactggctgcactgaactgctggctgcgtctgccagcagtgcatttttccccacgccagcgcgctctgaacgatggcctggcggcgcaaactctgactttccatgctcacgcgagaggcaaaactgcgatcctgttggctcattccttgtaatagcaaactacccaaaaccagcagcatcaggaccagagccagactgctaacacccttttcgcggttcacaggttgaatcctgtcacgctatagctggcattcaccacggtttgcggttcagacttactggcagcacgcatattaaccgtcaacaccgggctgaagccgctgacatcctgacgtacgacctgaaaagtgtcgataatgatggcatccggattagtgactttatcccagcccttaccttcacaggatgtcgcaccgcgtagcgtttccagcacatgctccttcagacgaaatccaatctggtcggactcttttaccggttcgcgatcccagataccgttactgttcgcatcccactgcacaatgacacagtcaccctgtccgacaatttccagcccttcgccggtacagatgccatgacaataacccgccctctggagatgcttcgcgacggtaaatacccgcagccagatttcatcttccagcgccagcttacgggtgctcgttaaactttcacgctgtaacgcaggcagaaagcgtgccgcccccagcaacaatacgctactgatcgccatagcaatcaacacttccagcagagaaaaaccttgctcttttacaggcatccttctgtttctccttgctgacaaagccggagtcttccccacgggctaaccaccagccaccactcgcccgtactgtttttgaagcgaatatgcccggcccatgcggtattgcgcaggccaaagaaagcaaggctaggtgtcaggtcgctcatttcgacttcgggccagcgtggcacaaagaccaatggactactgccatgacaggtattggccccagcagcggaactcacaaggcaccataacgtcccctccctgataacgctgatactgtggtcgcggttatgccagttggcatcttcacgtaaatagagcaaatagtcccgcgcctggctggcggtttgccatagccgttggctctgctgccagtattgccagccatagagtccacttgcgcttagcatgaccaaaatcagcatcgcgaccagcgtttcaatcagcgtataaccacgttgtgttttcatgccggcagtatggagcgaggagaaaaaaagacgagggccagtttctatttcttcggcgcatcttccggactatttacgccgttgcaggacgttgcaaaatttcgggaaggcgtctcgaagaatttaacggagggtaaaaaaaccgacgcacactggcgtcggctctggcaggatgtttcgtaattagatagccaccggcgctttaatgcccggatgcggatcgtagccttcaatctcaaagtcttcgaaacggtagtcgaagatggattcgggtttacgtttgataatcaacttcggcagcggacgcggttcgcggcttaattgcagatgagtttgatccatatggttgctgtacagatgcgtgtcgccaccggtccagacaaaatcacccacttccagatcgcactgctgcgccatcatatgcaccaataacgcgtagctggcaatgttgaacggcaggccgaggaagacgtcacaggagcgctgataaagctggcaagagagtttgccgtctgccacatagaactggaagaatgcatggcacggtgccagcgccattttatccagttcgcctacgttccacgcactaacaataatgcggcggctatccgggtcgtttttcagctggttcagtaccgtagtgatctggtcaatatgacgaccatctggcgttggccaggcgcgccactgtttaccatacactggcccgaggtcgccgttttcatcggcccattcgtcccagatggtgacattgttttcgtgtagataagcaatgttagtgtcgccctgcagaaaccacagcagttcatggatgatggaacgcaggtggcaacgtttagttgtcaccagcgggaatccatcttgcaggttaaaacgcatctgatgaccaaaaatggaaagcgttccggttccggtacggtcgtttttctgtgtgccttcgtcgagcactttttgcatcagttctaaatactgtttcatggttcctcaggaaacgtgttgctgtgggctgcgacgatatgcccagaccatcatgatcacacccgcgacaatcatcgggatggaaagaatttgccccatgctgatgtactgcacccaggcaccggtaaactgcgcgtcgggctggcggaaaaactcaacaatgatgcgaaacgcgccgtaaccaatcaggaacaaaccactgacagctcccattgggcgtggtttacgaatatacaggttgaggataataaacagcaccacaccttccagcagcagctcgtaaagctgacttgggtggcgcggcagcacaccgtaagtgtcgaaaatggattgccactgcgggttggtttgcagcagcaaaatatcttctgtacgggagccagggaacagcatggcaaacgggaagttcgggtcaacgcggccccacaattcaccgttaataaagttgcccagacgcccggcaccaagaccaaacggaatgagtggtgcgataaaatcagagacctggaagaaggaacgtttagtacggcgggcgaagataatcatcaccacgataacgccaatcaggccgccgtggaaagacatgccgccgtcccagacacggaacagatacagcggatcggccataaactgcgggaaattgtagaacagaacataaccaatacgtcccccgaggaagacgccgaggaagcccgcatagagtaagttttcaacttcatttttggtccagccgctgcccggacgattcgcccgtcgtgttgccagccacattgcaaaaatgaaacccaccagatacatcaggccgtaccagtgaagcgccacgggtcctatactgaaaatgaccggatcaaactccggaaaatgcagatagctactggtcatctgtcaccacaagttcttgttatttcgctgaaagagaacagcgattgaaatgcgcgccgcaggtttcaggcgctccaaaggtgcgaataatagcacaaggggacctggctggttgccggataccgttaaaagatatgtatatgatccgcgttataaccctccgcgaatcagcccgcccatgccgcgacgctccataaaggctgcaacctgatggcgaacttcggtcgccagttgcgcttccagactacgctgcgcaagattttctgcttcggcataatcaatgcgccgcagcaggtattttgcccgcgctacagaacgtccgttcatagacagatggcgatacccaagcccaatgaggattgccacgcacatgggatcgcccgccatttcaccgcacaaacggagatcgattccatgtatttccgcttcccgggcgatcatcgccagagctcgtaacattgcaggatgaagactgtcataaatgttcgccacccgggtattgttgcgatcaacggccagaatgtattgagtcagatcgttggtgccaacagagatgaaatcgacccgctttgccagatgcggcagcataaataccatactcggcacttccagcatgatgccgatacgtggtttgggaatttcgtaaccgatcatctcctcgacttcacgtccggcacgttcaatcaggcggcgtgcttcatcaacttcatcgaggcttgtgaccatcggcaacagaatattcaggttgcccgtagcggcattagcacgcagcatcgcccgcacctggatcaagaagatctccggctgatcgagcgtaatgcgaatcccacgccaacccaggcatggattctcttcgctgatcggcatgtaaggcagctgcttatctgctccgacatccagcgtacgcaaggtgacgggtttatcattgaacatttgcagcatcccctgatactgcgccacctgttcttcttcgctcgggaaaccactttgcagcatgaatgggatttcagtgcgataaagaccgatgccatcaatacggctgcccagtttttcttcatgttccgggcttaaaccagcattgagcatgacttttatacgctcaccgctttttaactgcgcgggtaaattgacgtcatcttccgccagacggctaagctcaatctcttcactaattagccgctgatattcttgcagcagtaccggctccggatcgaccagcaattcaccgcgatagccatcaacgatcagcgtcctacgatgcagcacgctaggctgaatatccgcgcccatcacggtagggatccccagcgcacgtaccatgatcgcagcatgggagttggctgcgccatctcgcacgacaacaccgactaagcgatcctggggcagctcagcaagcgttgtcgcactcagttcatctgccaccagaatgaaacgttccggccaggcgttcggcccttgattagcgtcatcaagatgaaacagcaatcgctgacccagcgcacgtaaatcgccagcccgctctttgagatagttatcacttagcgcggcaaactgttcggcaaatttttcaatgaccgtttttaccgcccactctgccacgctgcctttatcaacctcggcaaacaattcgcgacgcagccgggtgtcgctaagcaggtggctgtaaagatcgaaaatagccgccgtttctttttgtgcaccggcggcaaagcgtttgctgtagcggcgaaactcgtttgccgcttcttccagcgccccggtcagtcgttcgcgttccagagccggatccagcgtacttgcctgatacacctgttccattaaaggtaacgtggcatcctgccagccttcggcaatcgccacaccaggtgctgccggtaatgcgcggattcgcgtctggcgatattgcccaaacaaggcagtcaactggctctgagaaagaatagctgccatctgggtggcaagcgtcaccaggaaggattcttcactttcgtcatactggcgcaactctcgttgctgtaccaccagtacaccaagcaactggcgacgttgaataattggtacgcctaaaaacgcgcggaaacgttcttcttttacggaggggatgtatttgaagctggggtgcttttgcgcatctgcaaggtttatcggttccgccagcctgccaaccaggccgacgatcccttcatcaaacgcgagcgttacagtgcgaccgcgtggttttttcagcccccgggtcgccatcaggtagtaacaacgtcgatcatgatcggccaggtagacgctacagacctcggtatccatcgcaagacagatgtcggtaaccagaatatttaacgcctcattcaggcgtggtgcgctggctaccttttcgactatttcgcgcaggcgagtgagcataattggcgtgacttaacctcttttacgtcgataagcagatgcgttttgtggttttggcgtattttcctgcagactcatcaccacactcgcgaactctttcattaccctacggtagacatcacgtttaaaactcaccacctgtctgaccggataccagtaacttacccatcgccagccgtcaaactctggtgtactgctggtttgcatattgatttctgcatcgccgctcaccagctgcaagagaaaccatttttgtttttggccgatacaaaccggcttcgtgtcccaacgcaccaaacgtttcggtaatttgtagcgcaaccagttacgcgtactagcaaggattcgaacgtctttgcggcttaatcctacttcttcaaacaattcacggtacatcgcctgctctgcggattctccggggttgattccgccttgcggaaattgccaggagtgctgaccaaatcgccgggcccacattacctgcccctggcgattacaaatcacgatacctacgtttgggcggtagccatcgtcatcaatcaccggactacctcaaaataaagctttatatacgaatgattgtttcatactccaggaagacggtaaaccactctctgcagggcattacacactaataacaattgaataactcacagttatgtgcagagttataaacagaggaaggggtggatagccgtttttattcaccttttctgtggatagagttgtgaagaactacggaattactacgggaaaacccggagcattctgaataagcccgatatagacattttaaaatattcattatcagtcaatgcattacatgtaattttagtaatgaaaaagagtaattcgtgacccaggtcacacctctcatttacgggttggcgaaagatcaaccaatgccgtatttatccacagaatgtgccactaagttaagcactgaaccactaaaaactggagtttcgtcgcacgtcaaggctgtaaatggaaacagtagtggaggtttttcacagttatcccagctttctgtggataacatggtgtaagatcctgtttattttcagtgaccagatttggaaaacccgttgcagtgttgcgcaactcgattaccggcaacctaaaaagcaatataaatcagagaattgaacaacgcatgtggaaaaagttacactgcgaatattcggcacataattgctgtttgttttttaatcaaggtatcatgacatgtcccaacctcgcccactgctctctcctcccgaaactgaagaacagttgttagcgcaagcacagcaactttctggttatacattgggagaactggcggcacttgtcgggctggttacgccagagaatttaaaacgcgataaaggctggattggcgtgttactggagatctggctaggtgccagcgcagggagtaaacctgagcaagattttgctgctctgggcgtggaacttaaaactatccctgtggatagtcttggtcgtccgctggaaacaacattcgtttgtgttgccccgttaacgggcaatagcggggtgacctgggaaaccagccacgtgcgccacaaactcaaacgcgtactgtggataccggttgaaggcgagcgcagcatcccgctggcgcagcgtcgcgttggaagtccgttgctgtggagcccgaatgaagaggaagaccggcagctacgcgaagactgggaagaattaatggatatgattgttctcggtcaggttgagcggattaccgctcgtcacggggagtatttacagatacgaccgaaagcagcgaatgcgaaagcgcttaccgaagccattggtgcccggggcgaacggattctgacgctgccacgcggcttttatttgaagaagaatttcaccagtgcactactggcccgtcattttctgatccagtaaccatcgctttgacctgccgctttccgggcatataattaccgcttcatttttttggcagggctttttagatgttatttgcatggataaccgatcctaacgcctggcttgcgctcggtacgctgacgctgctggagatcgttcttgggatcgacaatattattttcctttctctggtggtggcaaagcttcccacagcacaacgtgctcatgcgcgccgtctggggttggcgggagccatggttatgcgtctggcgctgctggcaagtatcgcctgggttacgcgcctgacaaatccgctttttacaatattcagtcaggaaatttctgcccgtgatttgattctgcttctgggtggcttgttccttatctggaaagccagcaaggaaatccacgaatccattgaaggtgaagaagaagggctgaaaacacgcgttagtagtttcctcggcgctatcgtgcagattatgctgctggatattatctttagcctcgacagcgtgattacggctgtgggtctgagtgatcacctgtttattatgatggcagccgtggtgattgccgtaggcgtgatgatgttcgccgcgcgcagcattggtgattttgtcgaacgccatcctagcgtaaaaatgctggcgctctctttcctgattctggtgggctttaccctgattctggaaagtttcgacatccacgtaccgaaaggttacatctacttcgcgatgttcttctctattgcggttgaaagcctcaacttgattcgcaacaaaaagaatccgctctgatactccgtacgctctcctgcgggagggcgtactcactccttttaccctcacagtttaagattttcctgctttcaagatatataacgtcggtttataaacagactattatcataggtaggccaaatgaggataaccggatgaaaaaatgggcagtaataatttctgcagtcggactggcgtttgctgtttccgggtgttccagtgattacgtcatggcgaccaaagatggccgtatgattttgaccgatggaaaacctgaaattgatgatgataccgggctggtgagttatcacgatcagcaaggtaacgcgatgcaaattaaccgtgatgatgttagccaaattattgaacgttaacaaataaggtcagcatccggctggccttaagatttttctctttcccttttcccttccctctgccatttttatattccttatgtcgtgattataaaaaggaaacggctatgcaatatcaccgtataccccacagtagcctggaagtcagcacgctggggcttggcacgatgacgtttggtgaacagaacagcgaagccgacgcccacgcacaactcgactatgccgtcgctcagggcattaaccttatcgacgttgccgaaatgtacccagtacctccgcgccccgaaacgcaagggttaaccgaaacctacgtcggcaactggctggcgaaacatggcagccgcgaaaagttaattatcgcctccaaagtgagcggaccgagccgcaataatgacaagggcatccgcccggatcaggcgctggatcggaagaatatccgcgaagcgctgcatgacagcctcaagcgcctacagactgattacctcgatctttatcaggtgcactggccgcagcgcccgaccaactgcttcggcaaactcggttatagctggacggattctgcgcctgcggttagcctgctggatacgctggacgcactggcagagtaccaacgcgcgggaaaaattcgttatatcggcgtgagcaacgaaactgcatttggcgtaatgcgctacctgcatctggcggacaaacacgatctgccgcgtattgtcaccattcagaacccttacagtctgttaaaccgcagttttgaagtaggtctggcagaagtcagccagtatgaaggggtcgaactgctggcctatagctgcctgggtttcggcacgctgaccgggaaatatctcaatggtgcaaaacccgctggcgcacgtaatacgctctttagtcggttcacccgctatagcggtgagcaaacgcaaaaagccgtcgcggcgtatgttgatatcgccagacgtcatggcctggaccctgctcagatggcgctcgcgtttgtacgccgtcaaccgtttgttgccagcactctgctgggcgcaaccacgatggatcagctgaaaactaacatcgaaagtttgcatctggagttaagcgaagacgtattagctgaaattgaagcggtgcatcaggtttatacttatccggcaccataagattaacgccggttaaaaccggcgttaaatattaatgacggcgctgccagatccacagcgccgttattgccagcgcaaacagcgcaccgaagccaatgccaatgggcacgaccgggatgcctatcattaccgccaggctgtaaatgcccagcatcaacaacatggcgctgttttcgccaaggttttgtactgcaatcgcattccccgccccgacgctttttttaccccgctcctgtagcaacgcattgagcggaacgacaaaaaagccccccatcacgccaatcagcatcaacaaggcataggctggcagcagctcgtgttgcagggaaaaaatcagtaccaccacgccaatcaaaatcccggctggcatacagcgactcacggtttccagcgtaactaacttcgctgccgcacctgcgccaaccacgataccaatcgctaccatcgcgttgagataggtgggcgtagcgttatcggtaatgcccagcgccaccggtacccacagcaccaacaggaaacgcagcgtgacacccgctccccagaataaactggtgcccaccaggctaaaacgcgtttcaccattgcgccataggctggtgcaggcattcaggaaactgcgggtcatgttgatgagattccaggactgccccggacgcgccgccgccagtttgggaatgtagatattggcaacgaccgcaccaccgtaggccagtgcgcatgcggccagggcgacgaggacatgccagtcagccagcacaccaccggctacggaaccgagcaaaatcgccgctatggtagaagcttccattaaaccgttagctttcactaacttactacccgtggttaattcgccgagaataccgtatttcgccggactataggctgcagcaccaacacccaccagcgtatagccgagaaacggattgataccaaagcagatactggctgcgcccagcagcttcaggccgttggcaaacatcatcacccggcctttggcgaagctatccgccacctgcccgacaaacggcgcaaaaagaatgtaagcacctacaaacaccatttgcaggatgggctggctccactccggatagaactgcgctttcagtaacgccagagtggcaaacagtagggcattatcgccaaacgcagagagaaactgcgccacgataaccgctttcatccccttgctccacaagctagtgttagtgtgcacactctcactcatcgtgttgttccgcttcgtctacccagcttttcaacgtgacaaagtcaggtttgccgctgccaagtaatggcatctgtttcagatagcgaatatcgcgcggtacagcaagctccggcacgccgtgctcgcgggcatactgttgcaacttatcgcgcgtcagttcgttatctgtggtgaaaagcaccagtgcctcgcctttgctggcatcgctcttaatcgcagtggcatggactttatctgggctaacaccaagtgccagttgttccaccatttccaggctcaccatttcgcctgcaattttggcaaagcgttttgcgcggccctgaatctgcacaaagccctgctcgtcaaaacgcacaatatcgccagtgtcataccagccgcgctccatttcgccgcgaacattctcggcggtgggcacttccagtacacctggcttctccacccgcagatagccgttcattatgttcggccctttcagttgcaggcgtccgccctcttcgataccagggacgctcaacaggcgcgcatccattcctggtagaatacgccctaccgtaccgggtttcgccgccatcggtacgttgatagaaacgacaggcgcgcattcggtcacgccgtagccttcaaggatgcgcaggccaaatttatcctgccaaagctgtttggtactttcttgtaatttttctgcgcctgccaccacatagcgtagacgatagaagtcatacgggttggcgaaacgcgcgtagtgaccgaggaaagtgctggtgccgaacaacacggtgcaactgcggtcatacaccaactccggcacaatgcggtaatgcagcgggcttggataaaggaacacttctgcacctgtaagcagtggcgtaaacaggcctaccgtcagcccaaaggagtgaaacagcggtaacgcgctcataaagcgatcgttggtggtgaagtcggcaatcgttttaatctgctcgacattcgccagaatgcttttatggctatggacgacgcctttcggatggccttcagaaccggaggtaaaaaggatcagcgcctcttcttccggctgctgtttaacctgtgccagacgcggcatcagcaaatgagcgaagatccatactttgtcggcagtggtgacatctgcttttaaatcttccagatagacccagcgcacctgagtaagttgctccggcagatgccagagtttgcctttatcgagaaactggcgggaagtgaagatggttttgatttcagccgccgtaatagcactggtcagcccttttaccccggcagtgtagttcatcattgcgggcatgcggcgacgggcgatggccccaaaaatcactgccgcactgatgcctgcattgggcagcattaagccgatgcgttcgccttcaacactgtatttttcaaggatgcgtccaacaaacagcgttttcgtaagcaatttgcgataggagtctggggtaaagttgacgtcttcgacacatttcttcccggctccgaagcggtacattgcactcagtaaagattcgtacagcgtttcacgcgggcgcaccgccattcgcgcttccatcattatttgatgcagcatttcgccagcgattttgcgacggtcacgggcacgcggcgcatccggcatcgccacctgcgttggtggcaaaatatgcagagtaatttgcgggaacaagcgacgtttaaccagacctttcaggcggctgaagtgcgtaagttccgccccttcaatacgcacaggaataaccgttgcaccagacttcgccgcgacaaaacccgcgccatcgtagattttcatcaggctgcctgtcgtggtgatgcgtccttcagggaaaatcaccactggtcggccctgttccaccagacgtaccagatgtttaatagccataggttgcgtcgggtcgagaggaacaaagtcgataaaacttttcagccaacgcatataccactgttggcttatactggtgtaaacggcaaacactggacgcacaggtaaaaacagtccaagcaaaatgccatcaataaaagagacgtgattaggcgtaattagaacgcgctcgcccttcagtgcctgggtgtcacccgtaacgcgaacgcgatacaaaacacggcacaaatttcgaaaaaagctaaaaagcattccaactccctttgctctgattcagtaaaagcgaatggagggagattacacgagataaagaacgcgagcgacagtaaattaggtgcgaaaaaaaacctgcgcatccgcgcaggttggtgcaagagacagggtacgaagagcgtaccgaataatctcaccaatcaatacctctgggatcttgattgtggtctgcacgacgactcttcgccagcgagaaaacgcaaaggaatgaagggaaatgcaacgaggtgtgtaaattgtcggttactgttacagattgatgaccggcaaaaaaaacctgcgcatctgcgcaggctggtgtaattcatgtgctcaacccgaagttgacttcacctatcaatacctctgggatcaccactttagcaacctgaagccaaacgccaccagcggtcaatcgcaacagcgtttcgcaaagtgtaaccaaaggtttgcaatctctttttttgtcttacttatttgcgtttggctcacattcccacgatgaaaacacgccaccccttgaaccaacgggcgttttccgtaacactgaaagaatgtaagcgtttacccactaaggtattttcatggcgaccataaaggatgtagcccgactggcaggcgttagtgtcgccaccgtttcccgcgtcattaataatagtcccaaagccagcgaagcttcccggctggctgtgcatagtgcaatggagtctcttagctatcacccgaacgccaacgcccgtgcgctggcgcagcagaccactgaaacggtcggtctggtcgttggtgatgtttccgatccgtttttcggtgcaatggtgaaagcggtcgaacaggtggcttatcacaccggtaattttttattgattggcaacggttaccacaacgaacaaaaagagcgtcaggccattgagcaactgatccgccatcgctgtgctgcgttggtcgtccatgccaaaatgatcccggatgctgatttagccagtttaatgaaacaaatgcccggtatggtgctgatcaaccgtatcctgcctggctttgaaaaccgttgtattgctctggacgatcgttacggtgcctggctggcaacgcgtcatttaattcagcaaggtcatacccgcattggttatctgtgctctaaccactctatttctgacgccgaagatcgtctgcaagggtattacgatgcccttgctgaaagtggtattgcggccaatgaccggctggtgacatttggcgaaccagacgaaagcggcggcgaacaggcaatgaccgagcttttgggacgaggaagaaatttcactgcggtagcctgttataacgatagtatggcggcgggtgcgatgggcgttctcaatgataatggtattgatgtaccgggtgagattagcttaattggctttgatgatgtgctggtgagtcgctatgtgcgtccgcgcctgaccaccgtgcgttacccaatcgtgacgatggcgacccaggctgccgaactggctttggcgctggcggataatcgccctctcccggaaatcactaatgtctttagtccgacgctggtacgtcgtcatagtgtgagtactccgagcctggaggcaagtcatcatgcaaccagcgactaaccgcagttaaagcaattccagcgccagtaattcttcgatggtctggcgacggcgaatcaaccgcgcctgaccattatcaaacagaacttctggtaacagcggacggctattgtagttggaactcatacttgcgccatatgcccctgtatcatgcagtaccagataatcacctgccttcacttccggcaaggcgcgggtttcaacatttcccccttcctgctgggtaaagacatcgccgctttcacataacggtccggcgacgacggtttccaccgttggcgcgtgttccagagaacgaccatcagctgccagggcactgatatggtggtaactaccgtacattgccgggcgcatcagatcgttgaacccggcatcaaccagcacaaagtggcggctccccatttgtttgacgctccgcacctgagtaattaatacgccagactgcgctaccaggaagcgacccggttcaatttccagtttcacagggtggcccaaatggcgggcgatttgctcacgcgcggcattccacagaccataataatgttcggtatcaaccgcctcttcaccctgttgataaggaacagaaagcccaccgcccgcagaaatagcctgtaaatcctgaccgaattcgatgacctgacgcaccatagcaccacacacctgttccagatgggcataatcaacgccagaaccaatgtgcatgtgaatgccgaccagctgcagatgatgacgttgtatcacgtccagtgcggcgggcagatcggtgtaccagataccgtgcttgctgttttcgccaccggtattggttttttggctatgtccgtgaccaaaccccggattaacgcgcagccatacccgatgccctgggctaacctggcccagttggtcgagcatatcaacagaacccgcattcaccggaatttgcaattcactgacgcgttcaagcgtcgcctgatcgataacatctgccgtaaaaacaatatcatcggggtgcgtttgcggattgtaacccgccgccaacgcacgctctatttcgcctaagctgacggaatccactttcacgccctgctcacgcattaagcgcaaaatatgaatattggaacaggctttctgtgcaaagcgcaccacatcaaactgtttcagcgctgcaatctgccgacgaataatttgcgcatcgtagacccacaccgggcagccaaattcagcgggcaaacgcagcagattttcggcggtgagatcggtatcggtgctgaacagactatgtggcataacaaactccagataagtgcttttttatgattacgccacatcataaaaagaataaaaaatatcgatttatgtcgagtctatgcaaaaatgatatggattaccggattgcgagagagcgctaatggccgccgttaacttacgtcatattgaaatttttcatgcggtaatgaccgccggaagcctgactgaggcggcacacctgctacacaccagtcagccaaccgtcagccgcgaacttgcgcgctttgagaaggtgatcgggctgaaattgtttgagcgcgtacgtgggcgattacatcctaccgtgcaaggactgcgtctgtttgaagaagtgcaacgatcctggtacggactggatcgcattgtcagcgccgcagaaagtctgcgcgagtttcgccagggagaactgtctattgcctgcctgccggtctttagccaatcttttttaccgcagctcctgcaaccctttctggcacgttatcccgatgtcagcttaaatatcgtgccccaggaaagtccgctacttgaagagtggctcagcgcccagcgtcatgatttaggactcactgaaacgctccatacgcctgcgggaacagaacgtaccgaattactctctttagatgaagtgtgtgtgttacctccgggtcatccgctggcggtaaaaaaggtattaacgccggatgattttcagggtgagaactacatcagcctttcccgtactgacagctatcgccagttgctggatcagctatttactgaacatcaggttaaacgacgcatgatcgtagaaacccacagcgccgcgagtgtctgcgcaatggtacgggcgggggtaggtattagcgtggttaacccgctcaccgcactagattatgcggcaagcggtttagtggtgcggcggttcagtattgcggttccgttcaccgtcagcctgatccgccccctgcaccgcccgagtagtgcgctggttcaggcgtttagtgggcatttacaagcggggttaccgaaactggtcacttctcttgacgctattttgagcagtgctacgacagcataattagctcagcataaaagcgacagcatcctcggcatggatcgccgcggtatcaaacacaggcaaaacactgcgctcttctggcaccagtaaaccaatttctgtgcagccaaaaatgacgccctgtgcgccctgttctgcaaggcgagcaatcacttgcgcacaataagcgcgactcgcttcggtaaattgccccagacacagttcttcaaaaataatctgattaattttcgcccgttcatccgcttcaggaataagacaattgatggaaaattgttccgtcagccgcccgcgataaaaatcctgttccatggtgtaacgcgtacccagcagcgccacacgagtcattccggccccggtaattgcacgtccggtggcatccgcaatgtgtaagaaaggcagagtgcaacgactctcaatggcatccgccactttatgcatcgtattggtacatagcacaataccttctgcgcccgcccgctgtaagccaagcgccgcctcagccagaatgtccccggttttatcccattccccgcgacgctggcactcttctatttcatgaaaatcgacgctatgtagcagcacttgcgcagagtgaagcccaccaagccgctgtttaatgccttcatttatcaaacgatagtaaggaatggtggattcccagctcattcctcccagcaaaccaattgttttcattcctctctcctgatgtgtgttaccgcaacaaggctgaataaggaacgagacaaacgcctcaacggccaagtgcccaatctctattaacgaaaaaagggccggatgtacagcacatccggcccgtgaaatcagacgccgatatttctcaacttctcgcctgccatcagtttgcgttcgatatgttccagcgtgacatttttggtttccggaatgagccagaaagtaatgcccacaaacgcaatgttcagcgcagtgtagagccagaacgtaccggcagcgccaatgctatcaagcagtgtcaggaaggtcgcgccgataatcatattgctcacccagttcgtggtggtgctacaggtaataccgaaatcgcggcatttcagcggctgaatttcagagcacaggatccacaccactggcgcggcgctcatcgcataaccggcaatacacatcatcgtcatgccaacagagagccaggacaagccactggaagccgtaccgttatcaaactgcatcaggcaatagcccagcaccagagtgcctaacgccatcacgctgaaaccaattttcagagccggtttacgccctgctttatctaccgtaaacaccgcaataaaggtggcgaacataaaggtcagccctacgaccagagtcgcaatcatctgttgttctgtggtcgtaaagcccgccattttgaagatacgcggcgcgtagtacatgatgatgttcataccggtaaactgctgcatcgcctgcaacaacataccgagaaacacagcacgacggacgttacggttgatcttaaacagtgcccaaccgccctgttttaacttcaggctttcacgaatttcgttgagttcttctcgcgctttttcgctcgtatcgcgcagcatacgcaatacttcttccgcctcaatatgacgccccttttccgccagccagcgcgggctatttggcaggaagactaccagaataatcagcagaactgctggtaaagcaagaacccccaacattgcgcgccagttaccgctataactgaacgctgtatcggataaaaacgccagcacgatgccgagtgtgaccatcaactggtacatactgatcatcttaccgcgaacgttttcacttgccatttcagaaagatacagaggagcggtgtaagacgcgatcccgacagcaatgcccagcaccacacgagcggcgattaacatctctacgctggtcgcaaaagcggaccctatagaaccgagtacaaacaggatggcccccgccatcaggctgtatttacgccccaggcggaagctcagccaaccattaaacagcgcaccaattgctgcaccgagcatcatgctactaaccacccattcctgcaaacgactggtcagcacaaagtgatcggtaatgaacggcaacgctccggcgattacgccgatatcaagaccaaataacaatcctgcgaccgcagcagctacgctaacaaacatattcatacgccgcgtatcccgcaaagaacgtggcgttaaagcagattccgtattgatagtaaccattttttcctgccagcagagagtaagacatagtgaaaaaatacgtgaacaactcacgcaggtgtcaggtcggaaacagcataaatatggattaaattgctgcgacatgtcgttatgtgatggatattccaattttcaaattaagttgaattattgagattattattaaccacctaattttacagcagataaaattcataaagttcattaattgataattaatatggattatttcataaccatgatatggattatgatgatctacaggtataaaaaaccctgccatgcggcagggtcataaaagtaagaagaatgaattaacgcgccagccaaccgccatccacggcaatggtataaccattcacataatcactagcgctggaggcaaggaacactatcggccccatcaggtcactcggcagtccccaacgaccagctggaatgcggtcgagaatttccgcgctacgttgttcatctgcccgtagttgttgagtattgttggtcgccatgtaacccggggctatcgcattaacattaatgttgtgtttagcccattcgttcgccatcaatcgcgtcacacccatcacgccgcttttacttgcggtataagaaggcacacggatcccgccctggaaggagagcatactcgcgatattgataatcttgccgccattgccttgcgcgataaagtgtttcgccgctgcctgagacatgaagaatacgctcttgatattcaggttcatgacatcgtcccagtccttttcgctgaactcgagagcatcttcgcggcgaatcaatccggcgttattcaccaggatatcaatatgaccaaactccgctaccgcgcgatccagcagtgctggaataccatcaatctttcgcagatcggcggtcaggcttaaaaaacgacgccccagcgctgtgacctgctcgatggtttcagtcggttcaacgatgttaatgccaacaatgtcacagcccgcttgcgccagccccaacgccatcccctgacccagtccagtatcacaaccagtgacgaccgcaactttaccttcgagagaaaatgcacttaaaatcataacaataccttattcgtttatgcccacaattagcgcaaatctttaacggccacatggtccatatcatcaaagacctggttttcaccgaccatgccccagataaaggtataagctttggttccgacaccggaatggatgctccagctcggggagatcaccgcctgctcgttatgcatcacaatatgacgcgtttcttgcggctgccccatcatgtggaaaacgcaggcgtcatcatccatattgaaatagaaataaacttccatccggcgctcgtgggtgtgacacggcatggtgttccacaagttacccggagccagctccgtcagccccatactcaattggcaggtttccagtacatccgggacaaaatatttgttaatcgtgcgacggttactggtgaggttatcgcctaacgtgactggagatacttcgtccggtgtgacttttttggtgggatacgtcgtatgcgcgggtgcgcaattgtaataaaacttcgccggagtgccggtatcaatactggcaaagacaacttcttttgcacctttaccaacatacagggcgtcgcggtgaccgatttcatagcattggccatcgacagtaatcgtaccggcaccgccaatattgataacacctaactcgcgacgttcaaggaaatagcttacgccgagttgtttaccaacttccccgccaacggaaaccgttttagttatcggcataatgccgccaacaataattcggtcaatgtggctgtaaaccatggtgtactcatcggcgacaaataccttttcaaccaaaaattcattgcgcagcccttgggtatccagcgtttttgcgtgcgcactgtggatgctctgtcttacgtccacatcaacctccgataatcagtgaagcgtgaaaatagaaaacgatagtgaaacactgtttcgttttctctataaagggatgatatgcccatgggctagggttttcaattaaaaataaaacaatgtttcatttttaagttaaggattaaaaaaagtgcagtgtcgatcacgaatatgtcatgagaatggaaaaatgagggagcccagaaaatgtatgtcgacttgccagccatcattattcaacagattaatgacggcagatatttatcggtaaggaggaaatgcagagttattcgtcacgttcaatggtcaatgccacaccctggcccccgccgatacaaagcgttgccagtcctttgcgggcattacgtttcaccatttcatgaaccagagaaaccaggattcggcaaccggaagcgcctatcgggtgaccgagtgcgatcgcgccaccattgacattgacccgacgctcatcccactcaagcatcttgccaacgctaagcgcctgtgcagcaaacgcttcattagcctcgataagatcgacttcagccaactgccagcctacacgctccaggcaacggcgggtcgcatacaccggcgcaattcccatcaatgccggatctacaccaacgctggcaaatgcgcgaatgcgggccagcacgggtaaattcaacgctcgtgctttggcttcgctcatcatcattaccgcagctgcgccatcgtttatggaacttgcattacccgctgtcacagaaccgagactatcaaaactaggatttaaacgggctaagccttctgcgctggcgtcagtgcgtggctgttcatcggtatcaacaaccaacgtctgcccgttactttgggtcattaccgggacgatctcatctttaaatcgtccggcgtcaatcgccgctcgcgctttttgttggctgctaagtgcgtaagcatcctgcaactgacggctgatgccatattcgcgagccagattttcggcggtgacaccaatatgataatcattgaaggcatcccacaacccatcatgcacaagactgtcaaccaactggctattgccaagctgtgcaccggtgcggctatcagtcagaacatgtggtgcgcggctcatgttttcctggccaccggcgatgacaatatcagcctcgccacactgtatcgcctgagtagccagatgcagtgctttaagcccggaaccgcaaacgtcattaatagtgattgcagaaacgctattaggcagaccacctttaatagcgctttgccttgccggattctgccctgcccctgcagtcaacacctgaccaagaattacttcatccaccgcatatgcaggaacgccggtacgttctattaacgctttcacgaccagactaccaagttccacggcggaatgacccgctaacgcaccacgaaagcagccgataggtgtccgtaacgccccgacaatcacaacgtctttcatcacaacctcgcaccaattaacagtgcaatagtaaatgattgttaattacagttatcttaattgtttaaaaaaagtgatttttatcacaaaggaaatatgcctgagcagcagtcagagacataactggcacgtaaggtttgcaaccactaacccaccaatagaggggtagatagggcgttaatctcccatacttaacctggtttatggtaaattgccctccattttgtttaatttgtagatgatacgttcagataatgtctaatatttggtctaaagaagaaactctgtggagtttcgcgctctacggcacagccgttggtgcaggcacgctcttccttcctattcagttaggtagcgcaggggctgtggtcctgtttattactgctctggtcgcctggcctttaacatattggccacataaagccttgtgccagttcatcctcagtagtaaaacaagtgcaggtgaagggataacgggcgcggtaacacactactatggcaagaagattggtaatctgattaccacgctgtacttcatcgccttttttgtcgtcgtgttgatatatgcagtggcaattaccaacagtcttacggaacagctggcaaagcatatggttattgatcttcgcatccgtatgttggtgagtctgggtgttgtattaattctgaatctcatttttctgatgggacgtcatgccactattcgggtaatgggatttttggtattcccattgattgcctatttcttatttctttccatttaccttgtcggtagttggcaacctgatctattaacaacccaggtagagttcaatcagaatacccttcaccagatatggataagcattcccgtgatggttttcgcctttagccatacgcccattatttctacgtttgccatagacagacgtgaaaaatatggcgaacacgctatggataaatgcaaaaaaattatgaaagtcgcttatctcatcatctgcataagtgtactgttctttgtctttagctgcctgctttctattccacctagctatattgaagctgctaaagaagaaggggtcaccattttaagcgcgctttctatgctgccgaacgccccagcatggttgagtatttccgggattattgtcgcagtagttgcgatgagcaaaagtttcctgggtacgtactttggcgttattgaaggtgccacagaggtcgtcaaaacaacactacagcaggttggtgtaaagaaaagtcgtgcatttaaccgcgcactaagtattatgttggtaagcctgattaccttcattgtttgttgcattaacccgaacgcgattagcatgatttacgcgatcagcggcccgctcattgccatgatacttttcatcatgcctacgctgagtacgtatctcatcccggcgcttaaaccctggcgttccatcggaaatctgattacgctgatcgtgggtatcctgtgcgtaagcgtaatgttctttagctaatatcagttgtggatggttcaaaattgctacaattttgaaccattccatttttcataatattcatttgttattattccaccctatcacttctctcgtcatatcctagtattatcagttagttaaacacacaaagagatctgaacatcttaaataagactatttaagatgcataacttagattcgcaagatatcttctggtcattcaaaaacaatttgcgatatagatattcttataccatgagatagttatctggaccgctctcaaccatgcaagattaaatcagtgaaacataatcatatttgataacgagaaatgcatttttaaatgccttactcagaattatagcaaatacagattaatcgcaatttttcccggcaaaattacaaaatcatggtgtattgacatcatcaataaccaatgaaattatgcaattatatacggatagggaggttcttaacatggggctttgtagtcgttataaaagtcttacatgcaatagttgcagtatgcattgccaaataatgccagaagagagtccgcgtttgcagtattgcgcaaacagctgtttttgtatgtggcccgaagaaagtagttattttaatcgtggtgtggtagaaggtatcttaacaaaaaaccacaatgcgagattaagcggatatatttttgtcgattttagtgtaagttttttacgtctattccttgaaaaagactggattgactatcttgcaagtactgacatggggattgttttagtcagcgaccgcaatatgcaaagcttagctaattactggcgaaaacacaacagtgcaatatctgctgtcatatataatgatgatggtcttgatgttgccaatgaaaagatcagacaactatttattggtcgttatttaagttttaccggaggtaacacattaactcagatggaattcaccataatggggtatatggtttctggttataatccatatcagattgctgaagttctggatatggatatccgtagcatctacgcgtacaagcaacgaatcgaaaagagaatgggtggtaaaataaacgaattatttattcgtagtcatagcgtccaacattgatactcaacgaccagccagaatcatactctgtttatacgggcatttattgaaatgtccgtattttataaataggccgtcccctcaagagtaaacaccatagtatttaaaaccatcacacgaaaaattcagaagcattacgaaatatgaatttacaaacaatagtggcataaatgttaaccatgttaatttacgtaaagttttacgttgcaacattaaagcctcatttcaatcatcatgataaatataaaattaatatatatttatgccgtaaataccaatatacttagcaaactatgtgatctccatttcgattgatttagtgtttattgacgtatgtactggattattaacgataatatcgagttctggcctgagcaccgaaaattaataagcgtacataacgccgatcttaacgtcgttctgacaacgccagccagtcgatgtttaagtcttctacttgaagcttttcctgatgtggttgcacaacaagattttttcaccagagtctgggaagaagaaggtatgcgtgtgcctactaacacgttatatcagaacatatccattatcagacgcggatttcgcgctgttggtgatactacccacagcctaattgcaaccgtgccgagaagaggattcaagatccataatgacattaacatacaaaatcatgtaataaacagcagtacagacgcacatacacacaatgccccacctgccataaaagttaatgcgggatacaaagagagcattggtggcgcaaagaatttcaataacaaaatcctcaaacatataaaaagtcatctaattatgttgagcgcatttgtcataggcgcatattctgcatattggctatggaataataatcaaccgaagccatttttcaaggattacaagactgttgcggaaattaatggctgccattttaatgtaacagaagatacaattgatgggttgaaagagttcgataaatataaaacacggatactggatagcgggattaactgtaaaaaacatccgtggttatacttccctcttgcaaaatccagtccggggatgattgttatggcatgcaataaaaactataaccaacatgaagtggcaaactgtttaaccctgtcttaccgtgaggttaatcgtgattgattataaaaaaaacttattatttattttagtttttatcagtgggtttattctcttcactgtctattcttacactgcagaaaaaatgatatataacgaaacatgcactgcaaattgggtaatttttaatgaccagggacgagcaaatcttaccatcgactttatgtataacaaaaaaaataaaacaggaactgttgcgttgagtggaacctggcaacaaggtaacagagaaagtaaaagtatacggcgaaatattgaatacacatggattgaaaactatgacacagcccatttaacaagtaagaaagttaataagtttgagattatggatcaagttgatgatgatagacttgcacaacttattcctgatttttatgtctttccagaaaaaagtgtaagctataatatactaaagcaaggtaagcatgcttttattttgagcattggtaacagagcaataatgcattgtgcaaggtaaactaaaatagataacaaaaagatggaacctcgttaatcataaaacaataaaattaaatattctcgcagtatatggcagtctaaagcatcaaagatttgatcaacatctttcattttagacatctccttgcaatgtaaaatatcatgtatcaacaacatctggtgcaaatccaactgtcgaactcgacattcatcttagctcgattattattccttcgtacagtgcttgtaaacaatacagaaagaggattattaagaaccagtttactcagactatcaatagaggaaaggactaacgtttctttaaaagaattgatttcatcatctgttaaactaaactcatcattgacagatcgactgatataactgtttttaactttactctttacgttgactttattgacagaattaacattcacatatctactatttaatgtccaacttgttgtttgcgtgagaacattctcagcattaaggaatttttttaacggaatccttggtttctttttgctgtcgctatttacaatatcatgcatatagaccatttcatgaatctggctaaattcaatgtccattgtatacctcacatttttaccgtgactcgatgttactgttcaataatcaccttccatcaatactaaaattaatacccctaatgtgccgataacaaatatagtcattctacgtaacgtctccataaggtgatatttgacattatcagaagctgcgaattcggattttgctctaatcaaatgagagaaatgtaaaatgaagccacgaaatattaataatagcctaccactgcaaccattagttcctgatcaggagaacaaaaataagaaaaatgaagagaaatccgttaatccagttaaaatcacaatggggtctggtttaaattatattgaacaagaatctcttggaggaaaatatctaacacatgatttgagtataaagatagcggatatttctgaagagataattcagcaagcaatattatctgctatgagcatatataaatttagcataacagatgatttaatgagtatggctgtaaatgaactcataaaactgaccaaaatagagaataatgtagacctgaataaattcactactatatgcacagacgttctatccccccgcgtcaccagacataataaagaaaaaaacaaacgacattctacccttctcaaaaatcccctttttaattttcattgaaaaaatggcaattgatactatgaatccaggtcatacacattaaggcatttatgtaatgtcgtaattaagataactaataaggtgaatattagtaaaacaactaatgatgttattagtttgtagtgaacagtacttttaccaataatgaaaaatataccataagcaatgcaagcttaaaactcataatttaaaaaagataaatataaaaatatcaatgagtcaatcaataataatttggcatcacgagacacatcacagaggaatattatgagcacagaaacaattgaaatattcaataatagtgatgaatgggcaaatcaactaaaacacgcattaagcaaaggagaaaatctggcattactacatggtttaactcctgatatccttgatagaatatatgcatatgcattcgactaccatgaaaagggtaatataacggacgcagaaatttattataaattcttgtgcatttatgcgttcgaaaatcatgagtatctaaaagattttgcaagtgtatgtcagcccaaaaagaaatatcaacaagcatatgacctttacaaactaagttacaattacttcccgtatgatgactatagtgttatttatcgtatgggtcaatgtcagattggggctaaaaatatcgataacgcaatgcaatgtttctatcacattattaacaattgtgaggatgatagtgttaagagtaaagcgcaggcatatattgaactcttaaacgataatagtgaagataatggctaagcattacaatcatttggttaaatttgctggttatagtgcagttaaccactataaccagcacctcttatgttttcttaaatcagcatcttaaaacagttaagagcatactataaatcattatttttcaatgcgttagagaacaatctactttatcaaaattgaataaggctatttcagattacatcactgaattcctaagataaattagtgaacacaaccatagatatgtcaaatgtaatttcctgtagcgttaatgacacataaatatgaatagccataatttctattgcttaagcaggatgcaagaaaccaattttttcatagaggttaactaatggacttagaaaataaattcagttatcattttcttgagggattaacgctcacggaagatggaattcttactcaaggaaatgagcaagtttatattccacagaaagagttaggtgtattaatagtattacttgaatccgctggtcatgttgtactgaaagatatgatcatcgaaagtgtatggaaaaatattattgttagtgacgagtccctgacaagatgtatctattctttgcgctgcatttttgaaaaaattggctatgatcgttgcatagaaacaatctaccggaaaggttatcgtttcagcgggcaggttttcaaaactaaaattaatgaagataatactagtgactattccatagctatattccctttcactactagtttgaatacactggatccattaatacttaatcaggaattagtgcaaatcattagtaataaaaaaatcgatggtctctatacctatccgatggctgcgacaaatttttgtaatgatcacatatctcaaaatagtttcttgagcagattcaagccagattatttcgttacaggaagaataaaccagaataatgcagtgaacactttatacattgagttgatcgacgctaaaaaccttttcctcatcgccagtaatcatctccctgttgatgaactacataatacaagtcaatttattatagataatatccttcaaacggtacataaaccagaacgatctgtaagattagctaagcaggaccaaggatataagaatcattatttaagtgatgaaatgttagccggaaagaaagaactttacgacttcacccctgaaagcatttacagggccatgactatatttgatagattacaaaataaaagtgatatacagacgctaaaaacagaatgttattgccttctagcggaatgccatatgtctttggcacttcatggaaaaagtgaacttgaacttgctgctcaaaaagcattagagcttttagattatgtaagtgacataaccactgtcgatggaaaaattttagctattatgggactgataactggtctgtctggacaagcaaaagtatctcatatcttatttgaacaggctaagatacacagtactgatatagcctctctctactactatagggcactagtccactttcataatgaaaaaattgaagaggcaaggatttgtatagacaaaagtctacaactcgaacccagaagacgaaaagcagttgtgataaaagaatgtgtagatatgtatgtgcctaacccgctcaaaaacaacattaaactctactataaagaaactgagagtgaaagccatcgagttataattgacaacattttgaaattaaagcagctgacgagaatttgtatgcgataaatttttattgacgcaattttattatttagatgtatgcaacttgttatttaaacaacagagataaaaatatctaagatattcaccttattgcaagatatttaaaatgctctagagttaaaagtatgatgtaaagaccattggcctggacaattaaaaaagggagctttatgactaatccaatcggtatcaataatttatctcaaagtagtaatatagcgaatgcaacgggtgatgaagtcgtaagtttagataaacacatcaacaccagtgctactgatacagatcaaatacaagcatttatagttagtacatggatggcgccttttcaaaatgatatgtatagtgaagataatcctatcagtccttactataaaattgagtggtaaacgattgaccaaataaatcataacgagatacttttataatagtatctcgttcctttcattcaatcctcacacatgaaaaaatatgcgctcaccaaaagttaaattcttaaccatcttcacgttttgtatatttattacaaaaatgtctttcgccagcaactcttgctctaatgaagcaggaacaatgttcagaatcgaaccaaatttaattaaagctatcgctcttgttgaaagcaatctaaaaaaggatagcataggcaagaacagagataagaataacaatataaagagtttagattattggttaatgcagataaaccagatgcatattcccctgttaaaaaaacgtggaataataaaagatgaacgagatttgttagataacccttgtctgaacattaaaataggaaccgagattttatataaccattttagtcgttgtggagtaacgtggcaatgcctggggacttataatgcgggttttgcaatggataaccaaaaaaagagacagcaatatgccccaaaatatatattgtatataccaggcttaatgaactaaacaatcgtaaggcttcagcaaaatgagcctaaagcctcttttttttatatagtgcaaacacccatacgtaaagctgttttgatcaactcgataccactgtgaacatctaatttcttcatgatattgagtctatgagtttcgactgttttcctgcttaactgcaagaaattagcgatttctttgtttgttttaccatcagctatgagttgtaatatttcactctcacgatttgtaagttgattatcagaggaatacctggaagatattttttcacaatccatatgtacactatcaaaataagtgtaaccattactaatgctatcaatagcacgatttagtttcgccgggtgactggttttccatacgcatcctttcgcacctgcttcaagcaattttatactatcaatatacggcatctttgctacaaatgtaataatatgagcatctatcttatggcttttaacccattttacgagttcggcccccatcattccacctgcaaattctcctaaaataaatatttaggctgtagatttgttacactccgctatagctttcttcagatctttatagcccacttatttaacaacttgaaaataaggtgttttacctgggttgttacaaaaggattgcattgcgtaaacgctttttatttacaacaaaatggggaagtattacggcgaagataaattggagcgggcgaagggaatcgaaccctcgtatagagcttgggaagctctcgttctaccattgaactacgcccgcttcgagatgcgtaaggcattataaaccttacgctctccttagcaagtgccacgctgctgactgctgattaattcgccatcagcattttggcttgctgccctgaggcggcaagtaacgtagcggatcaattgccgttgcacggtaacgaatctggaaatgcaggcgaacagatgccgcatccgtgctccccatagtggcgattttttgcccagccttcacgctttgcccattatttaccagcatcgtgtcattatgggcgtaagccgtaatgtaatcttcactgtgtttaatcatgatgagattaccgtagccacgcagctggttgcccacatacaccacctttcctgcacccgcggcgtaaataggtgtaccccgtggagcactgatatcaatccctttattgccgccatctgctgtgctatacggcatgataactttccctgtcgttggccataaccaacaacgttgccctactggcggccaggaacttttcggtaccgcactactcggtgtaacgcttgcggttttggtcgtacttttggcggtacttttacgtgtaatactgctacttttcgccccacccagttttagtttctgaccaacttcaatggtgtaagggggggaaatgccgttcagtcgcgccagttcttttacgctggttcccgtggtgcggctaatacgatatagcgtatccccccgtttcacggtgtaaacggagccggaatacgttcctgtatcggaacttttgctaccgctacagcccgccaaaagcagtccaacgcttaacaacatcacgatacccagagattttttattcaggcgtcccgcactcaaaatctttcctcgcttaaaaaacaagacgccttatcatagcagccagcctcttgatacccaatctcttgcttctggaaaaacgtggtaatagagaaagaggttaatttcatttggcaaagggaagtatcatcagcaaaatattcgctgtagaggtatcgaacttcctgactttttaccctatttcccatcctgatgcgtaataatcccaatttatcacattgattttatcgccactcatattgatacgtatcactgcccctattcagagtcctgtttcgtatcatatctgtgtttttttaacgtcatcacacttcctacctcccctaacgcttatcgtcgtttctggcgtaaatcttgcctgcttagactaaatctttgccataagaaccaaatgttcaaatcgaggggatttctatggaagcgcgggaagcaaccgctacgggtgaatcatgcatgcgcgtcgatgccattgctaaggtcaccgggcgggcacgatatactgacgattatgttatggcgggcatgtgttatgcgaaatatgtacgtagccctatcgcacatggttatgccgtaagtattaatgatgaacaagccagaagtttgccgggcgtactggcgatttttacctgggaagatgtgcctgatattccattcgctacagctgggcatgcctggacacttgacgaaaacaagcgcgataccgccgatcgcgcactgctaactcgccatgttcgtcatcatggtgacgccgttgccatcgtcgtggcccgcgatgaactcacggcagaaaaagcggcgcaattggtcagcattgagtggcaagaattacccgttatcaccacgccagaagcggcgctggcagaagacgctgcaccaatccataacggtggcaatttactgaaacaaagcacgatgagcacgggtaatgtccaacaaacaatcgatgccgccgactaccaggtacaggggcactatcagacccccgttattcaacattgtcacatggaaagcgtaacaagcctggcgtggatggaggatgacagccgaattaccatcgtttccagcacccagatcccgcacattgttcgccgcgtggttggtcaggcgctggatattccctggagttgcgtacgagtcatcaaaccatttgtcggtggcggttttggtaataaacaggatgtactggaagagccaatggcggcattcctgaccagcaagcttggcggcattccggtgaaagtttcccttagccgtgaagagtgtttcctcgcaacccgtacccgccacgcttttaccattgacgggcaaatgggcgtgaaccgcgacggaacattgaaaggttatagtctggatgttctgtctaacaccggcgcttatgcatctcacgggcactccatcgcttctgcgggggggaataaagtcgcttacctttatcctcgttgtgcctacgcttacagtagtaagacctgctataccaacctccccagcgctggtgcgatgcgtggttatggcgcgccacaagtcgtatttgccgttgagtctatgcttgatgacgccgcgacagcgttaggtattgatcctgttgaaattcgtttacgcaacgccgcccgcgaaggagatgctaatccgctcacgggcaaacgtatttacagcgcagggttgccggagtgtcttgaaaaaggccggaaaatctttgaatgggaaaaacgccgtgcagaatgccagaaccagcaaggcaatttgcgccgcggcgttggcgtcgcctgttttagctacacctctaacacctggcctgtcggcgtagaaatagcaggcgcgcgccttctgatgaatcaggatggaaccatcaacgtgcaaagcggcgcgacggaaatcggtcagggtgccgacaccgtcttcagccaaatggtggcagaaaccgtgggggttccggtcagcgacgttcgcgttattagtactcaagataccgacgttacgccgttcgatcccggcgcatttgccagtcgccagagctatgttgccgcgcctgcgctgcgcagtgcggcactattattaaaagagaaaatcatcgctcacgccgcagtcatgctacatcagagtgcgatgaatctgaccctgataaaaggccatatcgtgctggttgaacgaccggaagagccgttaatgagcttaaaagatttggcgatggacgctttctaccaccctgaacgcggcgggcagctctctgctgaaagctccatcaaaaccaccactaacccaccggcgtttggctgtacctttgttgatctgacggtcgatattgcgctgtgcaaagtcaccatcaaccgcatcctcaacgttcatgatagtgggcatattcttaatccactgctggcagaaggtcaggtacacggcggaatgggaatgggcattggctgggcgctatttgaagagatgatcatcgatgctaaaagcggcgtggtccgtaaccccaatctgctggattacaaaatgccgaccatgccggatctgccacaactggaaagcgcgttcgtcgaaatcaatgagccgcaatccgcatacggacataagagtctgggtgagccaccaataattcctgttgccgctgctattcgtaacgcggtgaagatggctaccggtgttgcaatcaatacactgccgctgacgccaaaacggttatatgaagagttccatctggcaggattgatttgaggataacatcatgtttgattttgcttcttaccatcgcgcagcaacccttgccgatgccatcaacctgctggctgacaacccgcaggccaaactgctcgccggtggcactgacgtactgattcagctccaccatcacaatgaccgttatcgccatattgttgatattcataatctggcggagctgcggggaattacgctggcggaagatggcagcctacgtatcggctctgcaacgacatttacccagctaatagaagatcctataactcaacgtcatctcccggcgttatgtgctgcggccacgtccattgctggaccgcagatccgtaacgtcgctacctacggtggaaatatttgcaacggtgccaccagcgcagattctgccacgccaacgctaatttatgacgcgaaactggagatccactccccgcgcggtgttcgtttcgtcccgattaatggctttcacaccgggccgggcaaagtgtctcttgagcatgacgaaatcctcgtcgcctttcattttccgccacagccgaaagaacacgcgggcagcgcgcattttaaatatgccatgcgcgacgcaatggatattagtacgattggctgcgccgcacattgccgactggataacggcaatttcagcgaattacgcctggcatttggtgttgccgcgccaacgccgattcgctgccaacatgccgaacagactgcacaaaatgcgccattaaacctgcaaacgctggaagctatcagcgaatctgtcctgcaagatgtcgccccgcgttctagttggcgggccagtaaagagtttcgtctgcatctcatccagacgatgaccaaaaaagtgattagcgaagccgtcgccgcggcggggggaaaattgcaatgaatcacagcgaaacaattaccatcgaatgcaccattaacgggatgccttttcagcttcacgccgcaccaggcacgccgctcagcgaattactccgcgaacaaggactgctaagtgtcaaacaagggtgctgcgtgggtgaatgtggtgcctgtacggtgttggtcgacggcacagcaatagacagttgcttataccttgccgcctgggctgaaggaaaagagatccgcacgctggaaggtgaagcgaaaggcggaaaactttctcatgttcagcaggcttatgcgaaatccggcgcagtgcagtgcgggttttgtacgcctggcctgattatggctaccacggcaatgctggcgaaaccacgcgagaagccattaaccattacggaaattcgtcgcggactggcgggaaatctttgtcgctgcacggggtatcagatgattgtaaatacagttctggattgcgagaaaacgaagtaaaaggatatccggcctgaattcaggccggattcactgaggttatgtgtttaacaactcatatttcttaatcttgcgatagagcgtagcaatgccgatgcccagttcatcagcaacttgcttcttgctgttatgacgactaagcgcctcgcggatcatttgcttttccatctcctccagcgccgtgccgcccgcatcatcgagactcaggtgcgcctcactgacctctgttacatcactttgctccgttgtgccattattcagcagatttggcggcaatagcgtgctgtcgataacttcaccactaggaaccacgttaaccagatattccatcaaattgcttaactcgcgcaggtttccgggccaacgatgcttacgcaatatttcgacgacatcgggagcaatgccaggataaacgcttcccagacgacgggtatgcagatgtaaaaagtaatgcaccaatagttcaatatcttcctgacgttcacgcagcggtggcagagttatcgggataacattaagtcggtagaagagatcttcgcggaatttaccttcggcaatgaactgggccaaattctgattagttgcagaaatgatgcgaatgtcgacttgtattgggctactggcaccaatcggcagaatttcacgtgcctcaatagcgcgcagtaatttagcctgcaacattaatggcatatcacctatttcatcgagaaacagcgtgcccgtattcgccgcctgaatcaaccctgttttaccgttggcagaagcgccagtaaatgcacctttaacataaccgaacagttcgctctccagaagctgctccggaatcgcggcacagttgatagcaataaagggtttattccgtcttccgctcaacttatggattgcacgggcgacgacttctttacccgtgccgctttcaccaaccaccataacgctggatgggctgggtgcaatacggctaatgagtcgttttaattgccgcataacacggcactcgccaaccaattgttcaatatgcggttcatcaggtgcatttgctacagaaaaactggtatggctttggtgaaacgccattaaaaataattgtcggccctgaatgttatgcaattgaccaatgattaattcacttttatcgtcccaactaacaatatgctgcatatgtccatgggtaaaattactctcaaatgttaatggtctgaaacggataggtttcccaataatattattttgcacaacaccaagtgtttttaaggcagtctgattaacaaactgaacccgattttcatcatctacaactaatacgccctgatccatattatcgatcatggtcgcaaatattttactgatgttatctcctggcccctgatcctccagaagtttgctaacaaaaatggtggatatatggcgaacataatcagaaaattcgcgtaaattatcactgatatgctcttgttgctcgtgggtaacggcaatcaaacttatcaccccaacacaacgatcctgtaaaatgacaggcgtacccagaaatgctttttcgcggcaattttctttactatcgcaaccttcgcaaaggggatcgaagcgagactgtgtcacaactttttcagttttcgtttccaggacgtggcggagcaggcgactgttgccgctcaactggcgaccaagaaacttcccatacgcgcccgttccggcaacgcgacacaagttttcatcaacgatctcaacctcaagctgcaaaacgctggcaagcattctggcaaaacgctgaattgtcggttgaatttgcatcaatacactctgcgtagtagcaagctccatagctttaccttccagacttacttaaaagtcgatcattgaagacgttgatggttcacagatcatgatgatattaactcaggcgaaattggctttgataaaaacataagatttttatcattttctaatgaaattatggaagagatatcacatttctatatcaatatgagaattacggcggtgagtttatcaaactgaagagagatagcctgcccctttatcttatttctgatacttagcagcaaataaataacgcgataaaaaaagccaaacgttttcgtattttacaaacaaccagaagctggcatcaatttgtgatcaaccccacacattatccgtcaaattagtcttttgcagccgcgcggataattctggcacacttattgttagtcccaggtatagctgtgaaaacaccaatcactttggcaagtcacagtgaaataaaccactttgcctgtcattccactaccgggactttatgatgaaaactgttaatgagctgattaaggatatcaatagcctgacctctcaccttcacgagaaagattttttgttaacgtgggaacagacgccagatgaactgaaacaagtactggacgttgccgcagcattaaaagcactgcgtgctgaaaacatcagtaccaaagtctttaatagtggattaggtatttccgtattccgcgacaactccacccgtacccgcttctcttatgcttccgcgcttaacctgctcggccttgcacaacaagatctcgacgaaggcaaaagtcaaatcgctcacggcgaaaccgtgcgtgaaaccgccaatatgatctccttctgcgccgacgctattggtattcgcgacgatatgtatctgggcgcaggcaacgcctatatgcgtgaagttggcgctgcacttgatgacggttacaagcagggtgtactgccacagcgtccggctttagtgaacctgcaatgcgatattgaccacccgactcagagtatggctgacctcgcgtggttacgtgaacactttggtagtctggaaaacctgaaaggtaaaaaaatcgccatgacctgggcctactctccaagctatggcaaaccgctctctgtaccacaaggcatcatcggtctgatgactcgcttcggtatggatgtcaccctggcccatccggaaggctacgacctgatcccggatgtggttgaagtggcgaaaaacaatgctaaagcctccggtggtagcttccgtcaggtcaccagcatggaagaagccttcaaagacgcagacatcgtttatccgaagagttgggcaccttacaaagtgatggaagagcgtactgaattgctgcgtgcgaacgatcacgaaggcttaaaagcactggaaaaacagtgtctggcacagaacgcgcaacacaaagactggcattgtactgaagagatgatggaactgacccgtgatggcgaagccctgtacatgcactgcctgccagctgatatcagcggcgtatcctgtaaagaaggtgaagtgactgaaggcgtattcgaaaaataccgtatcgctacctacaaagaagccagctggaagccttatatcatcgccgcgatgatcctgtcccgtaaatacgccaaaccaggtgcactgctcgagcaactgctgaaagaagcgcaagaacgcgtgaaataacccctcgggccgatcagctggtcggccctctatttccagaggccaaaaggataggatatgtccgttttcagtttgaagattgatatcgccgataacaaatttttcaacggcgaaacaagtccgctctttagccaaagccaggccaaactggcgcgccagttccaccagaaaatagctggttatcgcccaacaccgctttgtgcgctggacgatctcgcaaacctttttggtgtgaagaaaattctcgtcaaagacgaaagtaaacgattcggtctgaacgccttcaaaatgcttggcggtgcgtacgccatcgctcaattattgtgtgaaaaatatcatcttgatatcgaaacgctgagttttgagcacctgaaaaatgccatcggcgaaaaaatgactttcgcgaccaccaccgacggcaaccacgggcgcggtgtggcgtgggcagcacagcaactcggacagaatgcggtgatttacatgccgaaaggttctgctcaggaacgcgttgacgccattctgaacctcggtgccgagtgcatcgtcacggatatgaactatgacgataccgttcgcctgaccatgcaacacgcgcagcagcacggctgggaagtggtacaggacacggcatgggaaggttacaccaaaatcccaacctggatcatgcaaggctacgcaaccctggcagatgaagccgtcgagcaaatgcgtgaaatgggcgtaaccccgacgcacgttctgctgcaagccggtgtcggagcaatggccggtggtgtgctgggttatctggtcgacgtctatagcccgcaaaatctgcacagcattattgttgaacctgacaaagctgactgtatttatcgctccggcgtcaaaggcgacatcgtcaacgttggcggtgatatggccaccatcatggcaggcctggcctgtggcgaacctaacccgctgggctgggaaatcctacgtaactgcgccacccaattcatctcctgccaggacagcgttgccgcattaggtatgcgcgtgctgggtaatccgtacggcaacgacccgcgcatcatctccggtgaatccggcgctgtcggtttgggcgttctcgcagcggttcattatcacccgcaacgtcaaagcctgatggaaaaactggcgctgaacaaagatgccgtggtgctggttatcagcactgaaggcgacaccgacgtgaagcactaccgcgaagttgtctgggaaggcaaacacgctgtagcaccttaatcaccctattggaactgctccctgcaaaacggggagtaaaaaatctggagaaaaataatggctaagaatattccattcaaactgattcttgaaaaagcaaaagattaccaggcggatatgactcgcttcctgcgcgacatggttgctattcccagtgaaagctgcgacgagaaacgcgtagtacatcgtattaaagaagagatggaaaaagtcggcttcgataaagttgaaatcgacccgatgggcaacgttctcggttatatcggccacggcccgcgtctggtggcaatggacgctcatatcgataccgtcggcattggcaacatcaaaaactgggacttcgatccgtacgaaggcatggaaactgatgaactgattggtggtcgcggtacttccgaccaggaaggtggcatggcctctatggtttatgccggtaaaatcattaaagacctcggtctggaagatgaatataccctgctggttaccggtacggtgcaggaagaagactgcgacggtctgtgctggcagtacattattgaacaatccggcattcgcccggaatttgtggtcagtaccgaaccaaccgactgccaggtataccgtggtcagcgcggtcgtatggaaattcgtattgatgttcagggtgttagctgccacggttctgcaccagaacgcggtgataacgccattttcaaaatgggtccgattcttggcgaattacaagaactctcccaacgtctgggttatgacgaattcctcggcaaaggcaccctcaccgtttctgaaatcttcttcacatccccaagccgttgcgctgtagcagacagctgcgcagttagtatcgaccgtcgtctgacctggggcgaaacctgggaaggcgcgctggacgaaatccgcgccctgcctgcagtacagaaagctaacgcggttgtttctatgtacaactacgaccgtccgtcctggactggcctggtttacccaaccgaatgctacttcccgacctggaaagtggaagaagatcacttcaccgttaaagcactggtgaatgcctacgaagggctgtttggcaaagcgccggttgttgataagtggaccttcagtactaacggcgtatctatcatgggccgtcacggcattccggtgatcggctttggcccgggtaaagaacctgaagcgcatgcacctaacgaaaaaacctggaaatctcacctggtgacctgtgccgcgatgtacgctgcaatcccgttaagctggctggcaacagagtaattactcttcacttattcccctccggttcgccggagggtttttggagtttgctatgcgcgtattgatcaaaaacggcactgtcgttaacgcagatggacaagccaaacaggatttgctgattgaaagcgggattgttcgccagttgggcaacaatattagcccgcagctcccgtatgaagaaattgatgccactggctgttacgttttccctggcggcgtggatgtccatacgcatttcaatattgatgtcggcatcgcgcgcagttgtgatgatttttttaccggtacccgcgcagctgcgtgtggcggtacaacaaccattattgaccatatgggatttggcccaaacggctgtcggttacgccatcaactggaggtttatcgtggttatgccgcccataaagcggtcatcgattacagctttcacggtgtgatccagcacattaatcacgcaatcctcgacgaaatcccgatgatagtcgaggaaggactgagcagttttaaactctatttaacctatcaatacaaactcaacgatgacgaggttttgcaggcattacgccgcttgcatgaatccggcgcgctgaccaccgtgcacccggaaaatgatgcggctatcgccagcaagcgggcggaatttatcgccgcagggttaaccgcgccgcgctatcatgccttgagtcgccctctggaatgcgaagcggaagccatcgcccgcatgattaacctggcacaaattgccggtaacgccccgctctatatcgtgcacctgtctaacggcttaggtctggattatctgcgtcttgcccgtgcgaatcaccagccagtctgggttgaaacctgcccacaatatctcctgttggacgaacgcagttacgatacagaagatggcatgaagttcattcttagcccaccgctgcgtaacgtacgcgagcaggacaaactgtggtgtggcatcagcgatggtgcgattgacgtggtggcaaccgatcactgcaccttcagcatggctcaacgcctgcaaatttctaaaggcgatttcagtcgctgcccaaatggcttacccggtgtggaaaaccgcatgcagttactgttttccagtggcgtgatgacgggacgtataacaccggaacgctttgttgaattaaccagcgcaatgcccgccaggttgtttggcctgtggccgcaaaaaggattattagcgcccggttccgacggcgacgtggtgattatcgacccacgtcagagccaacaaattcagcatcgccatctccacgacaacgccgactacagcccatgggagggttttacctgtcagggcgcgattgtcagaaccttatcccgtggtgaaacgattttctgtgacggcacctttacaggcaaagccgggcgaggtcgtttcctgcgacgcaaaccgtttgtccctcccgtgctctaaccactgccagggatctatacacaatcaagaatgatgagtgaggaaaaatgagtaagaaaattgttctcgccctgggcgggaatgcgctgggcgatgacctggccgggcaaatgaaagcggtaaaaattacttctcaggcaattgttgatttaattgcccagggacatgaagttatcgtcactcatggtaacgggccgcaggtgggcatgattaaccaggcctttgaagctgccgcaaaaactgaagcgcacagcccaatgctgccgatgtctgtctgtgttgcattaagccagggttatattggttacgatctacaaaacgctttaagagaagaactgctttctcggggcattaataaacctgtagcaacgctggttactcaggtcgaagtcgacgctaacgatccggcattcctcaacccgaccaagccgatcggtagcttctttaccgagcaagaagcagagcaactgacaaaacagggttacactctgaaagaagatgctggtcgcggctatcgccgtgttgttgccagcccaaaaccggttgatatcattgaaaaagaaacggttaaagctctggtagatgcaggtcaggtggtgatcaccgttggcggtggtggtatccctgttattcgtgaaggtaaccatctgcgtggtgccagcgcggttatcgataaagactgggccagcgcccgtttagcagaaatgattgatgccgatatgctgatcattctgactgcggtagaaaaagtggccattaacttcggtaaagagaatgaacagtggctcgatcgcctgagtttaagtgatgctgaacgctttatcgaagaaggtcattttgcgaaaggttctatgctgcctaaagtggaagctgccgccagctttgctcgctctcgcgcaggtcgtgaagcactgattaccgtattgagcaaagcgaaagaagggattgaaggcaaaacaggaacggtgatttgtcagtaatttaaaggccgggtgggtaataccatccggccaaagattgtcaagtaagtgcgctttgttgatgccggatgcggcgcgagcgccttatccgtcctacaaaacatcgcaaattcaatagattgcaatgcacttgtaggcctgataagcgtagcgcatcaggcaatttggcgtttgtcatcagtctcaggccgggtgggtaataccatccggccattttcatttaagccacttccagcacttcttttgtcgctttcacgccctgatgcatcaacatcattaacgcctcaagtacgccgccgccaatcgcccgggctttatcagaaacgctggtgaaatcagcggtttcaccacgaggatcgatatcaccaattttaaaaccaccaaccactgccaggccgtcgttcaacaagccacgcaccatccccgtcaacggtgctttaatttcatgctcaccaatccaggcaatcacatcgccctctttcaccagatcgcctaatttcacgttggatcgcataatgcctgcagcaggagcacggatcacccgtcgggtggtatgccccataatattgccaggaacaccggtattctcctgcgcacaaccagagtaaatcacctgaccgagccagtgcccgcgatttgtttcaattaccgcatgacaatccttcccagcagtaaagcccggcccaagcgcgattgttactggtgccatatctgcccgcgttcccaaattctgtttcgccagaatagcgtccaccacgcaaagcggtttcagttcatcaagcaaactacaggcgggatctaccatcacaggaatgaatccgcgttcggtaagtttcatcgcttccgcagagctggttgccaggcgagcagtgacgccttcgaccgtcatttcgccatcgaacacggcctgggcaaacgccacggtacaacgaatcactgtcggtttttccacttccagcatgatcactttaaaacccgcatgatacagacgtagcgccacaccactggcgatatctcccgcaccgcgaatcaccaccagctggtgtccggaaggatgagaaggtttcatcatcagcccacccggcgcgttatttttcacctgtaatatttctgccagcacgctgatggcgatctcctgcggcgtttccgcacctatgttgtaaccaacgggcgcatgtaaacgggcaatatgttcttcagccacgcctttctcacgcaattgacgcaggaaaagctgaaccttgcgacgacttgccagcaaccccaaccatgcaatgggctgttcaatgagtttgtcgagggcttcacgatcctgattattcgtggcaatcaggacaaaattatcagggcgaatatccagtgcttccactgccgcaccaaagctctcagcatggagaagcgtggtacttggtgggaatagttcaggattgaggctttcgcgataaatatcagcaacggcaatatcaaatcctaatagcgccgcactctgggctatcgcccggttgacatgccccgcgccaatcaacaccagacgtggacgcataccatggacgctgataaatacactcattgcacctccacaatcactcccgacagcatccgcaccgttacgagccatacgtccatggaataatcgcggcttacgttcctgcaatgcctgaaggctctcttcaatcaccttccgctcaaccattccgccaccaattgtaccgacgatagaaccatcggcgcgcactaacatttgtgcagaatggcggggagtgctgcctcggctatcaacaatttgcgccatagcaaacggacaattttgctcttcgagttttgcagcctctgtgaaaatattcataccaacctcaatggatatcctttcagtaacccggaatacccgggccgttaattcacaaatctgcgcgcgattgcaggatgttcttgtatatcgcccagccagattgcctctacgtcgtgttgttgcagcggttgaaggagctcgctttgtgcaatcgcattctcacattgagaaaaacggttaatgaaccagactcgccgacaaccttgcggtacgtttttaaacgccccctgagggtggcgaaccagcgcaacgagatcgctcagttgcaaggttgcatcaggtgttaacccggtaatatcagcaaactggctccagcgatggacattttctgtgctcactttcgcgcccaaagtatgtcctcccatcacagcaatcacgcagcaactgcttttgggtatgcaaggttcgtgctcatcaggcgcttttaacggcattccacggctgccatctgcttcaatgagaattacgtcacactctggtcgttgcaccagtgcatcaatcgcttctggcgtaaatccctgcacttttccctggttcgctttccagctgtgaaaacaaaaactaatgggggatgtaagagacgcatgaggaagcatggcgggatcacgacagaaaaccacgggccagtgagacgttggcataaacatatgtgtcgtcgtcgtgattaacacacgcctgccgctagcctggagcagttctgccagccaaaaaagcaagctggttttccccccagcaccaacaacagaaatcacagtgggacgtttctgcgcacctaaatcaatgactaatgcgcttgggtcaactatacttttcacgagtctttatgacctctctgggataaattatccccaacttaatccatcaggaagtaacgcaattatcaggcgttattagcccctataaataatggaaccactatgagtgccatcgactgtataattaccgctgccggattaagtagtagaatggggcaatggaaaatgatgttaccctgggaacagggaacaattcttgatacaagtatcaaaaatgcgttgcagttttgtagccgaattattttagtcaccggctatcgtggtaatgaactgcacgaacgttatgcgaaccagagcaatatcactattattcacaacccagattatgcgcagggtttactaacatccgtcaaggccgcagtacccgcagtgcaaacagaacattgttttctcacccacggtgacatgccaaccctcaccatcgatatttttagaaaaatctggagcttacgaaatgatggcgcaatactgccactccataatggcatccccggccatccgattttagtgagtaaaccatgcctgatgcaggcaatccaacgacccaatgtcaccaatatgcgtcaggcactccttatgggagatcattattccgtcgaaatagaaaatgcagaaataattttagatattgatactccggacgactttattacagcgaaggaaaggtatactgaaatttaaaaaacgtagttaaacgattgcgttcaaatatttaatccttccggcactcattatcataatgataaggaatcactgattttgagaaaagagaaaaattgataaatgggctggcaataataattttcaggagtgattttaattctcatttagcacctgtgagttcattcacaaaaagcccttaagtttcgagccgcctcacatttttttatatttcccgccaaacctggcaagagtggtgcgattgttgctctatccccctaaaccaccggatttctcaacaccggtcactcaatgatatctgtataagctaaggagagggttatgggggatattatgcgtcccattccgtttgaggaacttttgacgcgcatatttgatgaataccaacaacaacgcagtatctttggtattcccgagcaacagttttacagtcctgtaaaaggtaaaactgttagcgtcttcggtgaaacctgtgccactcccgtcggccctgccgctggcccgcacacgcagctcgcgcaaaatattgtcacttcctggctgactggcggacgcttcatcgaactaaaaaccgtccaaattcttgaccgcctggagctggaaaagccctgtatcgatgccgaagacgagtgctttaacaccgaatggtctaccgagtttaccctgcttaaagcctgggatgaatacctcaaagcctggtttgccctgcaccttctcgaagcgatgttccagccttctgattccggtaaaagcttcatctttaatatgagcgtcggttacaacctcgaaggtattaagcaaccgccgatgcaacagttcatcgacaatatgatggacgcatctgaccatccgaaattcgctcaatatcgcgatacgctgaataaattactccaggatgacgcatttttagctcgccacggattgcaggaaaaacgcgaaagcttgcaagccttacccgctcgcatccccaccagtatggtgcatggcgtcaccctctccaccatgcacggctgtcctccgcatgaaatcgaagccatttgccgctacatgctggaagaaaaagggctcaacacctttgtgaaacttaacccgaccttactggggtacgcgcgtgttcgtgagatcctcgatgtctgcggtttcggttacataggcttaaaagaagagagttttgatcacgacctcaagctgacgcaagcactggaaatgctggaacgcctgatggcactggcaaaagaaaaaagtctcggctttggcgtaaaactgactaacactctcggcaccatcaacaataaaggcgcactgcctggtgaagagatgtatatgagtggccgtgcgctgttcccgctctccatcaatgttgcagcagttctctctcgcgcctttgacggcaaactgcccatttcttattccggtggtgccagtcagctgactatccgcgatatttttgatacaggtattcgccctattactatggcaaccgacctgctgaaacctggcggctatctgcgcttaagtgcctgcatgcgcgagctggaaggctccgacgcctggggacttgaccatgttgacgtcgaacgactgaacagactggcagcagatgcgttaaccatggaatacacccagaaacactggaagccagaagagcgtattgaagtggcagaagacctgccgctgaccgactgctacgttgccccctgtgttactgcctgcgctatcaagcaagatattccggaatacatccgtctgcttggcgaacaccgctatgccgacgcgctggaactcatctaccaacgcaacgctctgcccgccattaccggtcatatttgcgatcaccagtgccaatacaactgtacccgcctggattacgacagtgcgctgaatatccgcgaactgaaaaaagtcgcgctggaaaaaggttgggatgaatataagcaacgctggcacaaaccagccggttctggtagtcgccatccggttgccgtgattggtgcaggtccggcgggtctggcagcaggttacttccttgccagagcgggccatccggttacgctgtttgaacgcgaagccaatgcgggcggcgtggtgaaaaatatcattcctcagttccgtattcctgcagagttaattcagcacgatatcgattttgttgccgctcacggcgtgaaatttgagtatggctgcagtcccgatttaaccattgagcagttaaaaaatcagggcttccactatgttctgattgccaccggcactgataaaaatagcggtgtgaaactggcgggcgacaaccaaaatgtctggaaaagtctccccttcctgcgtgaatacaacaagggtacagcgctcaagctgggcaaacatgtggtcgttgtcggggcgggtaacaccgcaatggactgcgctcgtgcggcgttacgcgttccaggcgtagaaaaagcaacgatcgtttaccgtcgtagtctacaagagatgcccgcatggcgcgaagagtatgaagaagcgttgcacgacggcgtagagttccgtttcctgaataatccggaacgtttcgatgctgatggcaccttaaccttgcgcgttatgagccttggcgaaccggatgagaaaggtcgtcgtcgtccggttgaaaccaatgaaacagtaacactgcttgtagacagcctgatcaccgccattggtgaacagcaggatactgaagccctgaatgcgatgggcgtgccgctggacaaaaacggctggccagacgtcgaccataatggcgaaactcgtctgactgacgtctttatgatcggcgacgtacagcgcggaccatcctccattgtcgctgctgtcggaaccgcgcgtcgggcgaccgatgccatccttagtcgggaaaatatccgttcccaccagaacgataaatactggaacaacgtcaatccagcggaaatctatcaacgtaaaggcgatatctctatcacgctggtgaacagtgacgatcgtgacgcgtttgtcgcccaggaagccgctcgctgcctcgaatgtaactacgtttgcagcaagtgtgtggatgtctgcccgaaccgcgccaacgtctccattgcggtcccaggcttccagaaccgtttccagacgctgcacctcgacgcttactgtaacgaatgcggcaactgcgctcagttctgtccgtggaacggtaaaccgtacaaagacaaaatcaccgtcttcagcctggcgcaagactttgataacagcagcaacccaggcttccttgtggaagattgccgggtacgagtacgtctgaataaccaaagctgggtgttaaacatcgacagcaaaggtcagtttaacaacgtaccaccggagctgaacgatatgtgccgcatcatcagccatgtccaccagcatcatcattatctgctgggccgcgtggaggtgtaatcatgttgattctgaagaatgtcactgcggtacagctacacccggcaaaagtgcaggaaggcgttgatatcgccatcgaaaacgatgtgattgtcgctatcggcgatgccctgacgcaacgctaccccgacgccagcttcaaagagatgcatggccggattgtgatgccagggattgtctgcagccacaaccatttttacagcgggctttcccgcggaattatggcaaacatcgccccttgcccggatttcatcagtacgctgaaaaatctctggtggcggctcgatcgcgcccttgatgaagagagcctctattacagcggactgatttgttccctggaagcgattaagagcggatgtacaagcgttatcgatcaccatgcctctccggcgtatatcggcgggagcctctccacattgcgcgacgcatttttaaaagttggcctgcgcgcgatgacctgttttgaaactactgaccgtaacaacggcatcaaagagttgcaggaaggtgtagaagaaaacatccgtttcgcccgtttgattgatgaggcgaagaaagcgacaagcgagccgtatctggtggaagcacatatcggtgctcacgcgccgtttaccgtgccggatgccggtctggagatgctgcgtgaagccgtgaaagccacaggccgtggtttgcatattcacgctgcggaagacctttacgacgtttcctacagtcaccactggtacggcaaagacctgctggcacgactggcgcaattcgatctcatcgacagcaaaacgctggtcgctcatgggctgtacttgagcaaagatgacatcaccctactcaatcagcgcgatgcgttcctggtgcataacgcccgtagtaacatgaacaaccatgtcggctacaaccatcaccttagcgacatccgcaatctggcgttgggaacggacggcattggtagcgacatgtttgaagagatgaaatttgccttctttaaacatcgcgatgcgggtggtccgctgtggcctgacagttttgccaaagccctgactaacggtaacgaactgatgagccgcaactttggcgcgaaatttgggcttctggaagccggttacaaagctgatttaaccatttgcgattacaacagcccgacgccgctgctggcagacaatatcgccgggcatatcgctttcggtatgggcagtggcagcgttcacagcgtgatggtcaatggtgtgatggtctatgaagaccgtcagtttaacttcgattgcgattccatttatgcacaagccagaaaagccgctgccagtatgtggcgtcggatggatgcgctggcataaatgacagatgccctcttcccgcagggaagagggttaaataaggaaagaagatgattgaacaatttttcaggcccgactctgtcgaacaggcgctggaactgaagcgccgctaccaggatgaagccgtctggttcgccgggggcagcaaactcaatgctacaccaacccgtaccgataaaaagattgccatttccttacaggatctggaactggactgggttgactgggataacggtgcactgcggattggcgcaatgtctcgcttgcagccactgcgtgatgcgcgatttattcctgcagcgctgcgtgaagccctcggttttgtttacagtcgccatgttcgtaatcagagcaccattggtggtgaaatcgccgcccgccaggaagagagcgtgctgcttcccgtcctgttggcactggatgctgaactggtttttggcaacggcgaaacgctgagtatcgaggactacctggcctgcccatgcgatcgcctgctaaccgaaattatcattaaagatccgtatcgcacctgtgcgacccgcaaaattagccgttctcaggcaggtttaaccgtcgtgacggcagccgttgcaatgacagaccacgacggtatgcgaattgcgctggatggcgtcgccagtaaagcactgcgtctgcatgatgtcgaaaaacaaaatctggaaggcaatgcacttgaacaggctgtcgccaacgccattttcccgcaggaagatttgcggggcagcgtggcctataaacgctatatcacgggagttctggtagccgacctgtatgccgactgccaacaggctggggaggaagccgtatgatcatccactttactttaaatggcgcgcctcaggagctaaccgttaatccaggcgaaaacgtgcaaaagctgttgtttaacatgggaatgcactctgtacgcaacagtgatgatggtttcgggtttgccggttctgacgcaataatctttaacggtaatatcgttaacgcgtccttgcttattgccgcacagttagagaaggcagatattcgtaccgcagaatctctgggcaaatggaacgagttaagtctggttcaacaggcaatggttgatgttggcgtggtgcagtctggttataacgatccagctgcagctctgattatcaccgatcttctcgatcgcatcgccgcacctacccgcgaagagatcgacgacgcgctttctggtttgttcagccgcgatgctggctggcagcaatactatcaggtcattgaactggcggttgcacgtaaaaataatccgcaggccaccattgatatcgctccgactttccgtgacgacctagaagtcattggtaagcattatcctaaaactgatgccgcgaaaatggtgcaggcgaaaccctgctatgttgaagaccgcgtaacggctgacgcctgcgtcattaaaatgttacgtagcccacacgctcacgcactgattactcatctggatgtcagcaaagctgaagccttaccgggcgtcgttcacgttattactcacctgaattgcccggatatctactataccccgggtggtcagagcgcaccggaaccgagtccgcttgaccgccgtatgttcggcaagaaaatgcgtcacgtcggcgatcgtgttgctgcggtcgtcgcagaaagtgaagaaattgcgctcgaagcactgaagctcatcgacgttgaatatgaagtgcttaagccggtaatgagcatcgacgaagcaatggcggaagatgcgcctgtcgtgcacgatgaaccggtggtgtatgttgctggtgcgccagatactctggaagacgataacagccatgcagcccagcgcggcgagcatatgatcatcaacttcccgatcggttctcgccctcgcaaaaatatcgccgccagtattcatggtcatattggcgatatggacaaaggctttgccgatgccgatgtgatcattgagcgaacctataacagtacgcaagcgcagcagtgcccgactgaaacacatatctgctttactcgtatggacggcgatcgtctggttatccacgcctccacccaggtaccatggcacttacgccgccaggtcgcgcgcctcgtgggcatgaaacagcataaagttcatgtcattaaagagcgagttggcggcggttttggttccaaacaggacatcctgctggaagaagtgtgcgcctgggcaacctgcgtgaccgggcgtccggtactgttccgctacacccgtgaagaagagtttattgctaacacctctcgtcacgtcgcgaaagtcaccgtcaaactgggagcgaaaaaagatggtcgcctgacggcagtgaagatggatttccgcgccaacactggcccttacggcaaccacagtctcaccgtaccgtgtaacggaccggcgctgagcctgccgttatatccgtgcgataacgtcgatttccaggtcaccacctactacagcaacatttgcccaaatggtgcttatcagggttatggcgcaccgaaaggtaacttcgctatcaccatggcattagcggaactggctgaacagttacagatcgaccaactggaaattatcgaacgtaaccgggtacacgaagggcaagagctgaaaattctcggtgcaatcggtgaaggtaaagcgccgacctccgttccttccgccgccagctgtgcactggaagagatcctgcgtcagggtcgcgagatgatccaatggagcagtccgaaaccgcaaaatggtgactggcacatcggtcgcggcgtcgccattatcatgcagaaaagcggtatcccggatatcgatcaggctaactgcatgatcaaactggaaagcgacggcacctttatcgttcattctggcggtgcggatattggtactggtctggatactgtagtgacgaaactggcagcagaagtgctgcactgcccaccgcaggacgtgcatgttatctccggtgataccgatcatgcgttgtttgataaaggcgcatatgccagctccggtacttgcttcagcggtaacgcggcgcgtttggcagcggaaaatctacgggagaaaattctgttccacggcgcgcaaatgttgggtgagccagtggcagatgttcaactggcaacgccgggcgtcgtgcgcggcaagaaaggcgaagttagtttcggggatattgcccataaaggcgaaaccggcaccggctttggtagtctggtgggaactggcagttatatcacgcctgatttcgccttcccgtatggcgcaaacttcgctgaagttgccgtcaacacgcgtacgggtgaaatccgcctggataaattctacgccttgctggactgcggtacaccggtcaatccagagttagcgttgggacaaatctacggtgccaccctgcgtgctatcggccacagtatgagcgaagagatcatttatgacgccgaaggtcacccgttaacgcgtgatttacgcagttacggcgcaccgaaaattggtgacattccgcgtgatttccgcgctgtgctggtgccgagcgacgataaagtcggcccgttcggggcgaaaagcatcagcgaaatcggtgtaaatggcgcagctccggcgattgctaccgcaattcacgatgcatgcggcatctggttacgcgaatggcatttcacaccggagaaaatactcactgcgctggaaaaaatataaataataaatggccgcttcggcggcctgtttctctgtttgaacgatgactaaatagtgactgcgaaaatgagataagccgttctcaaggcgtcctgcgccccaaattcgtgggaatttattttactaattcagatgatcaaatttactttaaaaggagtgaagggatgtctgatataaaccatgcaggttctgaccttatatttgaactggaggatcgccctccctttcatcaggctctcgttggtgccattacccatctgttggcaattttcgttccgatggtaacccccgcgttaatcgtgggtgcggccttacagctttccgctgaaacaactgcctatcttgtttctatggcgatgatcgcctctggtattggtacctggttacaagtaaaccgctacggcatcgtcggttctggcctactcagtattcagagtgtcaattttagttttgttacggtcatgattgcgctgggcagcagcatgaaaagcgacggttttcacgaagagttaatcatgagcagccttctcggcgtctccttcgttggcgcatttctggttgtcggatctagttttatcttgccctatttacgtcgggttattacgcctaccgtcagcggtattgtggtactgatgatcggcttaagcctgattaaagtcggcattatcgattttggtggaggatttgcagccaaaagcagcggtacgttcggcaattacgaacatctcggcgttggtttattggttttaattgtggtgatcggctttaactgctgtcgcagtccgttgctacgcatgggagggatcgccattgggctatgtgtcggctatatcgcaagcttatgcctgggcatggtggatttcagcagtatgcgcaatttgccgttaatcaccatcccgcatccgttcaaatacggctttagttttagcttccatcagttcctggtggttggcacgatttatctgcttagcgtgctggaagcagtcggcgatatcaccgccacggcaatggtttcccgccgccccattcagggggaagagtatcagtcccggctgaaaggcggcgtgctggcagatggtctggtttctgttatcgcctccgctgtcggtagtttaccattaaccacgtttgcgcaaaataatggggttattcagatgactggcgtcgctagtcgttatgtcgggcgaaccatcgcggtaatgctggttatcctcggcttatttccgatgattggcggcttcttcacgaccattcccagcgcagttctgggaggcgcaatgacgttgatgttttccatgattgccatcgcagggattcgcatcatcatcaccaacggtttaaagcgccgtgaaacacttattgtcgccacttctttaggtttagggcttggcgtctcctacgatcccgaaatttttaaaatattgccagcctctatttatgtattagttgaaaaccctatttgtgctggcgggttaactgcgattttattaaatattatcctccctggtggctaccgacaggaaaacgttctgcctggtattaccagtgcggaagagatggattaacagtaaaggagtcaatgatgagtggagaacacacgttaaaagcggtacgaggcagttttattgatgtcacccgtacgatcgataacccggaagagattgcctctgcgctgcggtttattgaggatggtttattactcattaaacagggaaaagtggaatggtttggcgaatgggaaaacggaaagcatcaaattcctgacaccattcgcgtgcgcgactatcgcggcaaactgatagtaccgggctttgtcgatacacatatccattatccgcaaagtgaaatggtgggggcctatggtgagcaattgctggagtggttgaataaacacaccttccctactgaacgtcgttatgaggatttagagtacgcccgcgaaatgagcgcgttcttcatcaagcagcttttacgtaacggaaccaccacggcgctggtgtttggcactgttcatccgcaatctgttgatgcgctgtttgaagccgccagtcatatcaatatgcgtatgattgccggtaaggtgatgatggaccgcaacgcaccggattatctgctcgacactgccgaaagcagctatcaccaaagcaaagaactgatcgaacgctggcacaaaaatggtcgtctgctatatgcgattacgccacgcttcgccccgaccagttctcctgaacagatggcgatggcgcaacgcctgaaagaagaatatccggatacgtgggtacatacccatctctgtgaaaacaaagatgaaattgcctgggtgaaaagcctttatcctgaccatgatggttatctggatgtttaccatcagtacggcctgaccggtaaaaactgtgtctttgctcactgcgtccatctcgaagaaaaagagtgggatcgtctcagcgaaaccaaatccagcattgctttctgtccgacctccaacctttacctcggcagcggcttattcaacttgaaaaaagcatggcagaagaaagttaaagtgggcatgggaacggatatcggtgccggaaccactttcaacatgctgcaaacgctgaacgaagcctacaaagtattgcaattacaaggctatcgcctcagcgcatatgaagcgttttacctggccacgctcggcggagcgaaatctctgggccttgacgatttgattggcaactttttacctggcaaagaggctgatttcgtggtgatggaacccaccgccactccgctacagcagctgcgctatgacaactctgtttctttagtcgacaaattgttcgtgatgatgacgttgggcgatgaccgtagcatctaccgcacctacgttgatggtcgtctggtgtacgaacgcaactaataataaaactttaacatcctcgtgaggacatcattatgtctggagacatcctacaaacaccggacgcaccaaagccacagggcgcgctggataattattttaaaattaccgctcgtggcagtaccgttcgtcaggaagtactggctggcttaacgacctttctggccatggtttattccgttatcgtcgttccgggaatgctgggcaaagcaggttttcctcccgcagctgtgtttgttgccacctgtctggtcgcgggcttcggcagcttgctgatgggattatgggctaatttgccaatggcgattggttgcgcgatttccttgacggcgtttaccgcattcagtctggtactcgggcaacaaattagcgttcctgtcgcactgggcgcggtatttctgatgggcgtcatcttcaccgccatttccgtaaccggtgtgcgtacctggatcttacgtaatttgccgatgggtatcgctcacggtacaggtatcggtatcgggctgtttctgctgctgattgctgctaacggtgtgggtatggttatcaaaaacccgattgaaggcttgccagtggcgctcggtgcgtttacctccttcccggtgatgatgagcttgctggggctggcggtcatcttcggcctggagaagtgtcgcgtacccggcgggatcttgttggtgattattgcaattagcatcatcggcttaatctttgacccagcggtgaaataccacggtctggtggcgatgccaagcctgactggcgaagatggtaagtctctgattttcagcctcgatattatgggtgcactccagccaactgtacttccgagtgtactggcattggtgatgaccgcagtgttcgacgctactggcaccatccgtgccgtcgccggtcaggcgaatttgttggataaagacaaccagatcatcaacggcggcaaagccctgaccagtgacagtgtaagtagtatattctccggcctggtgggcgcagcgcccgcagcggtttatatcgaaagtgcggcaggaaccgccgccgggggtaaaacaggtttaaccgcaaccgtagtgggggcgttattcctgttaattctgtttttaagtccgctgagttttttgatccctggttacgccactgcacccgctctgatgtacgtaggtttgctgatgttaagtaacgtcagcaagctggatttcaatgattttattgacgctatggctggcctggtgtgtgccgtgttcatcgttctgacttgtaatatcgttaccggtattatgctgggctttgtgacactggtcgtaggccgcgtctttgcacgcgaatggcaaaagctgaatattggtacggtgatcattactgccgcactggtcgcattttacgcgggtggttgggcaatctaatagattctccgcgcctttcagcgcggagatttctttcagagaggattctcaccgctggcaacaatacgctgctggcggactcgcctgagttctctttcagtaagcaactgcagcgcctgtgttgggcaagattcaacgcaggctggcccctcttcccgctgttcacagagatcgcatttcacaatttgttgtcgggtatcccccggcaagctctgaatggtgatcattccaaacgggcacgcactgacgcaactctgacagccaatacaacgggcagaattggtctgcaccacctgctcgcccatcgtcagcgcccccacggggcaagcgccaacacaaggggcgttttcacactgatggcacatcaccggcgcactgatgctgtccagtcgctgtaccttcagccggggtaaaaagacatcggcattcaactcctgttcactagggtgagcgaccacacaggctacttcacaagtacggcagccaatacagtcagccggattaacgataattaagcttttcatcagcttgccttcgtatcaaacagagttaacatatcgcgcgccgcctgccttcctgcggccattgcagtgacaaccagatccgcgccatgaactgcatcaccaccagcaaagacttttttcagatgcgtctgggtaggtaaatacccgacgtcaccggtttgaatcaggccccatttatcgagtttaattccgctgccctgcaaccacggcatggcatgcgcctggaaaccaaaggccataatcagaacatcggcgggcaattcaaactcactacccgctaccggacgaggacgacggcgaccatccggccccggctcacccatggcggtacgaatcaggcccaccgcagttaaacgcccatcttcgtcacaagcgatatattgcggttgaacattgaactgaaactcgacaccttcctcgcgcgcattaaccacctctttgcggctgcccggcatactgacttcatcacgacgatacgcgcaggtcacgctggcggcattgaggcggatggaagtccgcaaacaatccattgtcgtatcgccaccgcccaataccacgactcgcttaccttccacgtccgtcagcggatactcttcagactccggcaatcccatgagctggcgggtatgggcagtcaggaacggtagagcctgaatgacaccgggcgcatcttcatgcggcagatctgctcgcatcatcccgtaagtccccacgccgatgaaaactgcatcatattcagaagttaaatcgctaaaggtaatatcgcggccaatttcacagttaagatgaaagtcgattcccattgcggtgaatatctctcgccgctggcttaataccgttttatcgagtttgaaaggaggaatgccaaaagtcagcataccgccaatttctggatggcgatcaaagacatcgacctgaactcctgcgcgcgccagaatatcagcacaccctaaccctgcaggcccagcgccaatcaccgccactttttcgctacggggaacaactttgctgacatcgggacgccagcccatcgccagcgcggtatcggtgatgtagcgttccagattaccgatagagactgcgccgctgtgatctttcaaagtacatgcgccttcacaaagacggtcctgtggacataccctgccgcaaatttctggtaaggaactggtctggtggcaaagttctgccgcttcaataatctttccttcctgtaccagacggatgtaatccggaatagcgttatgcagcgggcaatgccagttgcagttagctttttcggcacaataaacacagcggtcactctcataagtcgcttgttgtggatccagcccgcaatatatttcgccaaagtgggttttccgttcactcgcactaattttatctgcgcctttacggctgttaacggggagcaacgctgcactgcgagatggctgagcgtcactactcgcttttcctgctgccgttttgcgctggcgggccacctttatctgctgcaaccctttatcgtccatcagtcgtaacgcctgtgttgggcaaacttcaatacaggcttgcgtgccggaactgcgctggttacaaaggtcgcatttctgcgcaatcgtatcgaccatctcaacgacgccaaaggggcaagcgattgcgcatcttttacaaccaatacatttttgctcgtccagttgtacgctatcggactggaaagtcagagcattaaccggacaagccgtaacgcaaggggcattgttgcagtgatggcaggccaccggattcgcagcctggcctttccctacaacgtggatacgcggtcgaaagtcactgtgactcagcggccagttttcttgattgtgtgccaccgcacaggcaatttcacaagcatgacagcctatacattccgcagcttcagcagcaataaacttattcatttgcatccctttcatttaatgagttatgtcttctcaaatttcgcgatgcaataaacgggcatatattaggtagcatgaccgttttaattataattttgcgactgagttcaaattattgcccctcaatctatgccgctttcattatttcaacattgccgatcaaaagagcgctatccagataaaaacgattaaatgcgagagtgcgacatgccagaatgattaatgaaatatcaatatgagaaaattacagataattccattgtcaggttctcttctcattttcgtggtttaaccacgattatgtgattgcctccgcaattcctgtctctaactccccttcctcgcaaaaactggcactccacgagcatgtgtttagacagtttcattaacgtaaacggttgctttttactctggcgggcgaaaggagaaacactgatgagcgccatagattcccaacttcccagttcttctgggcaagaccgcccaactgatgaggttgaccgcatattaagtccaggaaagctgatcatactcggtctgcaacacgtccttgtcatgtacgcaggtgcagtcgctgttcctcttatgattggtgaccgactgggcctcagtaaagaagctattgcgatgctcattagcagcgatctcttttgctgcgggatcgtcacattattgcaatgtatcggtatcggccgctttatggggatccgcctgccggtgattatgagcgtgacctttgctgctgtaacaccaatgatagccattgggatgaacccggatatcggcctgctggggatatttggtgccactatcgccgcgggttttatcaccacattattagcgccacttatcggtcgcttgatgcctttattcccgccactggttaccggtgtggttattacttctatcgggcttagcatcattcaggtgggtattgactgggccgccggaggtaaagggaatccgcaatatggtaatcccgtttatttaggtatctcctttgccgtcttaatttttatcttgctcattactcgctatgcgaaaggatttatgtccaacgtcgccgtattactggggattgtatttggctttttacttagctggatgatgaatgaagtcaatttatccgggctacatgatgctagttggtttgcgattgttacgccgatgagctttggtatgccgattttcgatcccgtttccattctgaccatgactgccgtgttaatcatcgtgtttatcgagagtatggggatgttcctggcactgggtgaaatagtcggtcgtaaactctctagccacgatattattcgcgggctgcgtgtcgatggcgtagggacaatgataggcggcacgtttaacagcttcccccacacgagtttttctcaaaacgttggcctggttagcgtgacgcgcgttcatagccgctgggtgtgtatttctagcggaattatattaatcctgtttggcatggtgccaaaaatggcggtgctggtagcctccattccgcaatttgtgctgggcggcgctggtctagtgatgttcggcatggtactggcgacagggattcgaattctgagccgctgtaactacaccaccaaccgttacaacctctatattgtggcgatcagtctcggcgttggcatgactccgacgctctctcacgatttcttttctaagttaccggccgtactgcaaccgctgctacatagcggcattatgctcgcaacccttagcgccgttgtgctgaacgtcttctttaatggctatcagcatcatgctgacctggtgaaggaatccgtctctgataaagatttaaaagtcaggacagtacgtatgtggcttctgatgcgcaagctgaagaaaaatgagcatggagaataatatgaattttttaatgcgcgctatattcagtctgttgttgctttttactctctctattcctgtcatttctgactgtgttgcaatggccattgaaagtcgcttcaaatatatgatgctacttttttaaatggtttttacctgtcggcatccgctcaaaacgggcggttgtcgataaacgctcacttggttaatcatttcactcttcaattatctataatgatgagtgatcagaattacatgtgagaaattatgcaaacggaacacgtcattttattgaatgcacagggagttcccacgggtacgctggaaaagtatgccgcacacacggcagacacccgcttacatctcgcgttctccagttggctgtttaatgccaaaggacaattattagttacccgccgcgcactgagcaaaaaagcatggcctggcgtgtggactaacagcgtttgtgggcacccacaactgggagaaagcaacgaagacgcagtgatccgccgttgccgttatgagcttggcgtggaaattacgcctcctgaatctatctatcctgactttcgctaccgcgccaccgatccgagtggcattgtggaaaatgaagtgtgtccggtatttgccgcacgcaccactagtgcgttacagatcaatgatgatgaagtgatggattatcaatggtgtgatttagcagatgtattacacggtattgatgccacgccgtgggcgttcagtccgtggatggtgatgcaggcgacaaatcgcgaagccagaaaacgattatctgcatttacccagcttaaataaaaaaaccccgacatttgccggggttgtgagcataacgtaatgcttattttaccggacgcatcgccgggaacagaataacgtcgcggatggtatggctgttggtgaacagcattaccatacggtcgataccaattcccagacctgctgtcggcggtaagccatgttccagtgcggtgacgtaatcttcatcgtagaacatcgcttcgtcgtcacctgcgtctttcgcggcaacctgatccaggaagcgttgcgcctgatcttccgcgtcattcagctcgctaaagccgttaccgatttcacgaccaccaatgaagaactcaaagcggtctgtgatttccgggttaacgtcgttacgacgcgccagcggagaaacttctgccggatattcagtaatgaaggtcggctgaatcagatgtgcttctgccacttcttcgaagatctcggtaacgatacggcccagaccccagctcttctcaacgtggatgccgatagattcagcaattgctttcgcagagtcgaagttgtccagatccgccatgtcggtttccgggcgatatttcttgatcgcttcacgcatggtcagtttttcgaacggtttaccgaagtccagcgtcacgtcgccgtaggtcacttccgtcttaccgagaatatcctgtgccagagtacggaacaggctttcggtcagctcgatcagatctttgtaatctgcgtaagccatgtagagttccatcatggtgaactctgggttatgacgtacggaaataccttcgttacggaagttacggttgatttcgaatacacgctcgaagccaccaaccaccagacgcttgaggtacagttccggcgcgatacgcaggtacatgtcgagatccagcgcgttatggtgggtgataaacggacgcgcagcggcaccgccagggatcacctgcatcatcggcgtttcaacttccataaagccgcggttcaccatgaactggcgaataccagagaggatctggctgcgcactttaaaggtgttgcgggattcatcgttggagatgagatcgagataacgctgacgatagcgcgcttcctgatcctgcaagccgtggaatttatccggcagcggacgcagtgctttggtcagcagacgcaactcggtgcagtggatagacagttcgccggttttggttttgaacagcttacctttcgcgccgaggatgtcgccgaggtcccattttttgaactgctcgttataaacgccttccgggagatcgtcacgggcaacgtacagctgaatgcgaccgccaacgtcctgcagggtaacgaaagacgctttacccataatacgacgggtcatcatgcggccagcaacggcgacttcgatgttcagcgcttccagttcttcgttctctttgccgtcgaattctgcgtgcaattggtcagaggtatgatcgcgacggaaatcgttcgggaaggcaatcccctgctcgcgcaggttcgccagcttctcacgacgcgttttcagttcattgttaagatcgactaccgcgtcagcgccctgtgcgtgttgttcagacatgttggttcctcataaccctgctttcaaacttgcttcgataaattgatccaggctgccgtccagcacggcctgcgtgttgcgggtttctaccccggtgcgcagatctttaatgcgggagtcatcaaggacataagaacgaatctggctgccccagccgatgtcggatttgttatcttccatcgcctgtttctcggcatttttcttctgcatctccagttcataaagcttcgctttcatctgcttcatggcctgatctttgttcttgtgctgggaacggtcgttctggcactgggtcacgatcccggtcgggatgtgggtaatacgcaccgcagattcggtacggttaacgtgctgaccgcccgcgccggacgtgcgataaacgtcaatgcgcagatccgccgggttgatttcgatatcaatatcatcatcaacttccggataaacaaacgcggagctgaagctcgtgtggcgacgaccgccggagtcaaacgggcttttacgcaccaggcggtgaacgccggtttctgtacgcagccagccgtaagcgtaatcgccggagattttgatcgtcacggatttaatacccgccacttcaccttcgctctcttcgatgatttcagttttgaaaccacggctttctgcccagcgcagatacatacgctcaagcatgctcgcccagtcctgtgcttccgtaccgccagaccccgcctgaatatcgaggtagcagtcggcgctgtcatattcgccagagaacatacggcggaactcaagctgcgccagtttttcttccagggcgtcgagttcagcaacggcttcgttaaaggtttcttcgtcgtcagcttctacagccagttccagcagaccagaaacatcttccagcccctgtttcatttggtcgagggtgtcgacaacggcttcgagggaggaacgctctttacccagcgcctgtgcgcgttcgggttcgttccagacatccggctgttccagctcggcgtttacttcttccagacgctctttcttggcgtcgtagtcaaagataccccctaagaacgtcggagcgttccgtgaggtcctgaatgcgattatttaccggattaatttcaaacatggtctgatttcttttattgagctagtcaaaatgcggtgataagagcgggattgtacccaatccacgctcttttttatagagaagatgacgttaaattggccagatattgtcgatgataatttgcaggctgcggttgccgcgaaactcgttgatatcgagcttataagccagttgcacttcgcgcacgccgttatccggccagagggcggtatcgacattaaaagcaataccatccagcagtggaccgccgccgaccggttcgaccatcaccttcaaatgacgttcgcccaccagccgctgttgcagcagacggaaatgaccgtcaaacagcggctccgggaacatctgcccccacgggccagcatcgcgcagcagctgcgccacttccatggtcatttcggccgggcttaacggaccgtcacttaccacttcgccttgcaataggctagggtccagccactcagtaaccagttcgccaaaccgttgttgaaagagtttgaatttatcctcttccaggctcaaacccgccgccatcgcatgaccgccaaacttcagcatcatgccagggtagagtgtgtctaatcgctccagcgcatcacgcatatgcagcccctgaatggagcgaccggaacctttcagcgtaccgtcacctgctggcgcaaacgcgataaccggacggtgaaaacgctctttgatgcggctagccagaataccgacaacgccctgatgccattcggggtgatacattgccagcccgccgggtagcgtgtcacggctgcgctccagtttctcgcacagggtcagggcttcaatttgcattccttgttcgatctcttttcgcgtctggtttagcgcatcgagttcatttgccagcacgcgcgcttcgccgatgttgtcgcacaacaacagcgccacaccgacggacatatcgtccagtcgtccggcagcattgagacgtggccccagcgcaaaacctaaatcgctggcggcgagtttttgtgcatcacggtttgccacttcaagcagcgctttaatccccggacggcactttccggctcggatgcgactcatcccctgccaggtcagaatgcgattattagcgtccagcggcacgacgtccgccactgtccccagcgcgaccagatccagcagttctgccaggttaggaattgcgatgttacgctcatcaaaccagccctgatcgcgcaaaaaggtgcgcagcgccagcatcagataaaacgccacacccacgcctgccagacttttgctcgggaaattacagtcgcgcaagttagggttaatgatcgcttccgctgcgggtaatgtgtcgcctggcaaatggtgatcggtaacaataaccgggatgcccaagctgcgagcgtgctcaacccccgcatgggaggaaataccgttatccaccgtgacaattaactgcgcgccacgggcatgggcctgatcgaccacttccgggcttaagccgtaaccgtcttcgaaacggtttggtaccaggtagtcgatattgctgcaaccaaggctgcgcatcgccagcacgcttagagccgtgctggtcgcgccgtcggcgtcgaaatcaccgaccacaataatccgcgttccttcgcgaaaagcgttgtaaaggatctcaacggccttttcgacgccgctcagttgctgccagggcagcatacctttaacactgcgttccagttcttgcgcactgcgtactccccggctggcgtataaacggcgcagcaagggaggcaattcagcgggcaagtctgccgtttcatcgacttcacggcgacgaagttgtatctgttgtttcacgcgaattatttaccgctggtcattttttggtgttcgtcgaggaattctttcatctctttcggcggctggtaacccggaacaagtgtgccattgctcagcacaactgccggagtaccgctaacgccaagctggacgccaagtgcgtaatggtcggcaatatccacgtcgcaactggctggtgcgacgcttttacctgccatcacatcatcaaacgctttgtttttatctttcgcacaccagatagctttcatttctttctctgcatcgctgtccagcccctggcgcgggaaagcaagataacgcacggtgatccccagcgcgttgtagtctgccatttgctcatgcagtttgtggcagtaaccacaggtaatatcagtaaacacggtgatgacgtgtttttcctgcggcgctttataaacgatcatctctttttcaagcgcattcaactgctttaacagcatcttattggtgacattgaccggagccgtgccactaacgtcatacattggcccctgaatgatatgtttaccatcatcggtgatgtacaacacgccgctgttagtcagaactgtcttcatgccagctacaggcgcgggctgaatatcgctgcttttgatgcccattttggctaacgtttgttgaattgccgcgtcatcagcctgagcaaagccactaaacgccgctaacaaagtaaacaacataaaacctttcttcataaatcttcccgttcttttcagacatcacgcccgcgggtgatgctgttgatgaagttgccgcagacgctcggtagcgacatgcgtataaatttgcgtggtggagagatcgctgtggcccagtagcatctgcaccacgcgtaaatccgcaccatgatttaataaatgagtggcaaaagcgtgacgcaacacatgcggactcagcttttcgctgtcgatacccgccagcacagcataatgtttaatacggtgccagaaggtctgtcgcgtcatctgctgcgcacgctggctgggaaacaacacgtcaatactcacaccattcagcagccacggacgcccatgttccagataggtttccagccagtaaaccgcctcttcacctaacggcaccagacgctctttgttgcctttaccaatgacccgtaccacgccctgacgcaggctgatatcactcattgtcagtccgaccagttcagagacacgcagcccggtagcatacaacacttcaagcatggctttatcgcgtagctccagtggctgatcgattaatggtgcctgtaataaacgttcgacctgcgcttcgcttaaatcttttggcaaacgctggggcaatttcggactagcgagatgcgcactgggatcgtcttcacgaaacttttcgcgataaagatactggaacaatcggcgcactgcactcagcaaacgcgcactgctggtggctttatacccgccctccagccgttctgccagtaatgcctgcaaatcgtcactttgcgccgtcgccagcgtcaacccgcggtgatgcaaccactccaccatcatactcagatcgcgacggtaagcgttcaacgtattttcagccagatttttttccagccacagagcatcaagaaactgctcgatgcgtgccagatcctgtttcacttgcgccccttatggtcactcatttgatccattatgccttattgtgccgtgactaaagcgattctgatacactagccgcaaaagccacagcagaatcgagaagcttacgttatgaatatgggtcttttttacggttccagcacctgttacaccgaaatggcggcagaaaaaatccgcgatattatcggcccagaactggtgaccttacataacctcaaggacgactccccgaaattaatggagcagtacgatgtgctcattctgggtatcccgacctgggattttggtgaaatccaggaagactgggaagccgtctgggatcagctcgacgacctgaaccttgaaggtaaaattgttgcgctgtatgggcttggcgatcaactgggatacggcgagtggttcctcgatgcgctcggtatgctgcatgacaaactcagcaccaaaggcgtgaagttcgtcggctactggccaacggaaggatatgaatttaccagcccgaaaccggtgattgctgacgggcaactgttcgtgggtctggcgctggatgaaactaaccagtatgaccttagcgacgagcgtattcagagctggtgcgagcaaatcctcaacgaaatggcagagcattacgcctgatctcactgacggcttagcgcatatgctttgccgtcatctttatctttgcgtctcttgttgcaacaaaatccgccgtaaatcccgccattcagcttcgtccatgctgtcggctgccagccataaatgttgccgtttaccgccatcagaacgtaaacgcagcatcatgccgctcttaatcatccacggtgctttgacgatgctccactcctgcccttgccaacgcaaacgcccgtccatcaacaagcgaatttccccctggcgagcattaatacgccgctggctgcgaacgcaatcaaacaccaccaggctaagtaacaccatccataacggggtgtaactgagtggccagggcatgagtaaaataacagcggcaaccagcccatgaatcagcaaggaaagccactgtgcgcgccaggagacgcgcaaatcagattgccacaggaccacgttcccggttccgtgtctggatgagtcggaccatcatttccagttctgcatcggccggtttaccgtgattcatcagccagttaaacaggtccggatcgtcacattccagcagacgaataaagatgcgtttttcgtcatcgcttaagctgtcgtactcatgttcgaaaaacggcatgatactaatatcgagttcgcgcataccacggcggcatgcccaatgaatgcgggctttgttgttaatgtccatcttcttcctgtctcacgaaaatccagtacccggctattgtaacgtgtttttcgccttcttttacgggaatatcagtaaacaccatcgcgatcgcgaaattaattcacaacaattcaatggcttcatttttttggaagtcgcctcgcagaaggcacagatcgcgtagtgaaagcacttgcattgcctcatagctcttttaccattagtcattaatacgccgttaagcaactcaggactctattatggcttttacaccttttcctccccgtcagcctacggcttctgcccgtttaccgctgacgctgatgacgcttgatgactgggcgcttgccaccattactggcgcggacagcgaaaaatatatgcagggtcaggtgacagcagatgtcagccagatggcagaagatcagcacctgctcgccgcccattgcgacgccaaaggtaaaatgtggagcaatttacgtctgttccgcgacggcgatggctttgcatggattgaacggcgcagcgtgcgtgaaccgcagctgactgaactgaaaaaatatgcggtattctctaaagtgaccatcgcgccagacgacgagcgtgtgctgcttggtgttgccggttttcaggcgcgcgccgcgctggcaaatctctttagcgaactgcctagcaaagaaaaacaggtagtcaaagaaggcgcgaccactttgctatggtttgaacacccggcagaacgtttcctgatcgtaaccgatgaagctactgctaatatgctgaccgataaactgcgcggtgaagcggaactgaacaatagccaacagtggctggcattaaacattgaagcgggtttcccggtgattgatgccgccaacagcgggcagtttatcccacaggcgaccaatctccaggcgctgggcggtatcagctttaagaaaggctgttataccggacaagagatggtggcgcgagcaaaattccgtggtgccaataaacgtgcgctctggttgctggcaggtagcgccagccgactgccggaagctggtgaagacttagagctgaaaatgggcgagaactggcgtcgtaccggtacggtactggctgcggtaaaactggaagatggtcaggtcgtggtacaggtcgtcatgaataacgatatggaaccggatagcatcttccgcgtacgcgacgatgcgaatacattgcatatcgagccgctgccgtatagcctcgaagagtaaatctctttatcgcatcaggcatttatcgcctgatgcgacgctggcgcgtcttatcatgtctgggatttgatgcctttatcacaacagggacgaggcccgtagatcggataaggcgttcacgccgaatccggcagttgtgctccgatgcctgatgcgacgctggcgcgtcttatcaggcctacaaaggcatacccattacgcctgcccaatatacaaatagatcgccagaaagtggcacacactaccgccgagcacgaagccgtgccagatggcatggttgtatggaatgcgtttgcagacgtagaaaatcaccccgaggctataaaccacgccgcctaccgccagtaaggtaacgctgcccgccgcgagcttaactgccatttcataaattaccaccaggctcagccagcccatcgccagataggtcaccagagataaaattttgaatcggtgcgcgatggtcagtttaaacagaatacccagcaatgccaggctccagataacaatcatcaacccgcgcgctaacggagaatccagccccaccagcaaaaacggcgtgtaggttccggcaatcaacaggtaaatagcgcaatggtcaaatttcttcagccacatttttgcccgttgatgaggaatggcgtgatagagcgtgctagcgaggaacagcaggatcatactgccgccatagaggctgtagctggttatcgctgtggcgctggcattaagatccaccgcctgaaccagtagcaacaccagcccaacgataccaaacaccaacccaatgccgtgactgacgctgttggctatttcctctgccagactatatccctgcttaatgaggggcttctgaaccataacttactccggagaaacgtacacgcacatgtatacctctccagcgtaactgagaatagttccagtgaacacctgttagctaaaataaattctgatttgagactaatctcctaaaaatcatgaaattaaatgcgaaatttcaactaacaggcgtgagttcaatttaaagacatttaaattcaatcacataaaattgtgtctgaccgggatagatgtcagcaatgacttttttcagttcagtcagggtcatattttcctgctctgcatgtttttcagtcagcgtatccagcgttacggtactggttgcggtgacttcaatcgtgcaaaaataaccgtcatcttcaaaacgtccgacacgaagcacatcacccgttttgaagtggctttcagactcgtcgcggatggtgatggttttacgcccagccagaatgtcatcctggaaacgttgaaaaaaagtgatgtcgtttggctgcatggtactatttcctgtaagaattgactcatctggagcctatgatagtgaaaaaactcaccttaccgaaagatttcttatggggcggcgcagttgccgctcatcaggtcgaaggcggctggaacaaaggcggaaaagggccgagcatttgtgacgttctgaccggtggcgcacacggcgtgccgcgcgaaatcaccaaagaagtcttgccaggaaaatactatccaaaccatgaagccgttgatttttatggtcactataaggaagacatcaagctatttgccgaaatgggcttcaaatgttttcgtacatccattgcctggacgcgcatttttccaaaaggcgatgaagctcagccaaacgaagaagggctgaagttctacgatgatatgttcgatgaactgctgaaatacaacatcgaaccggtgatcaccctctcccactttgaaatgccgctgcatctggtgcagcaatacggtagctggaccaaccgtaaagtggttgatttctttgtacgtttcgcggaagtggtatttgaacgctataagcacaaagtcaaatactggatgaccttcaacgaaattaacaaccagcgtaactggcgtgcaccgctgttcggttactgctgctccggcgtggtgtataccgagcatgaaaacccggaagagacgatgtatcaggtgctgcatcaccagtttgtcgccagcgccctggcggtgaaagctgcgcgtcgcattaacccggagatgaaagtcggctgtatgctggcgatggtgccgctctatccttactcctgtaacccggacgatgtgatgttcgctcaggagagcatgcgcgaacgctacgtctttaccgatgtgcagctacgcggctattacccgtcctatgtgttgaacgagtgggagcgtcgcggatttaacatcaaaatggaagacggcgatctggatgtgctgcgtgaaggcacctgcgattatcttggtttcagctattacatgaccaatgcagtgaaggccgaaggcggcaccggcgatgcgatctctggttttgaaggcagcgtaccaaacccgtatgttaaagcatctgactggggctggcagattgatccagtaggtctgcgctatgcactttgcgaactgtatgagcgttatcagaggccgctgtttattgtcgaaaacggttttggcgcttacgacaaagtggaagaagatggcagcatcaacgacgactaccgcattgactacctgcgcgcccatatcgaagagatgaaaaaagcggtgacttacgatggcgtggatctgatgggctacacaccgtggggctgcatcgactgcgtgagcttcaccaccgggcagtacagcaaacgctacggctttatctatgtgaataaacatgacgacggtactggcgatatgagccgtagtcgtaagaagagctttaactggtacaaagaggtgattgccagcaacggcgagaagctttaagtcgatgaagtaccggatgcaatacttgttgcatccggtcagacaacttccctgttttatttcccgcccgccaaatcgataaaacttcccgtgacgtaagaggctttatcacttagtagccagacaatggcctgcgcgacctcttctgcctgtccaccacgctgcatggggatgttgctcttaacgcgatcgacgcgtccaggctcgccgccgctggcgtgcatttcggtataaataaaccctggccgcacgcagttaacgcggatcccctgcgcggcgacttccaggcttagtccggtggttaacgtatcaatcgcccctttgcttgccgcgtaatcaacatattcccctgggctacccaaccgactggccacgctagagacattgacgatagcgccgccactgccaccatttttaagcgccatgcgttttaccgcctcgcggcagcagagaaaatatcccgtcacgttggtggaaagtactcggttgattcgctctgcggtaaggttttcaacggtgcactgggtaaacaagatcccggcgttattgaccagcgctgctagcggttcatcgtgctgatcgattgctgtaaacatcgcaacgacctggttttcgtcgctgatatccgcctggagcacgaatgctttgccaccggcttgcgttattaagttcatcacttcctgcgccgcgtggaggttttgctgataattaaccgccaccgtatacccttcttgcgccaacagtaatgcagttgcccgcccgatgccgcgactgccaccagtcacaagtgctatagccatttgtttttccgagaaaaattaattcgttgacgtatctttgagattgctaacaaactggctcaatcttcaatgttggcacgcttttccccctcgccctttcagggagagggccggggtgagggtaaatattcgcgccagtgccggcctgttcccctcaccctaaccctctccccaaaggggcgaggggactgtctgagcacttttgtactttgtcatctgactaaaaaggcgccgaagcgcctttagaaaatagtcgaatcagtgaattactggtattcgctaatcggtacgcaggagcagaacaggttacggtcgccgtaaacatcatccagacgtttcactgtcggccagtatttgtctgccacacctgccgggaataccgcaacttcacggctgtacggatgcgcccactcggcgaccagttcgctctgaatgtgcggcgcgttcaccagcgggttatcttccagcggccagacaccggctttcacctggtcaatttctgcgcggatagccagcatcgcgtcgataaagcgatccagttccactttgctttcagattcagtcggttcaaccatcagcgtacccgccaccgggaagctcatcgtcggcgcgtggaaaccgtagtcgatcaggcgcttggcaatatccagctcgctgatgccggtttcttctttcagcgggcgaatatcgagaatacattcgtgcgccacgcgaccgtcgcgaccggtatacagcaccgggaaggcatcctgcaggcggctggcaatatagttggcgttgaggattgccacctggcttgcttttttcagcccttctgcgcccatcatgcggatgtacatccagctgattggcaggatagaggcgctaccgaacggtgccgcagaaaccgcgccctgacgggttaacatgccttcgatttgcaccacgctatgacccggtacaaacggtgccaaatgcgctttcacgccgatcggtcccatacccggaccaccaccgccgtgcggaatgcagaaagttttatgtaggttaaggtgactaacgtccgcaccaataaagcccgggctggtgatgccaacctgggcgttcatgttcgcgccatcaaggtaaacctgaccgccgaactgatgcacgacttcacacacttcacggatcgtttcttcatacacgccgtgggtagaaggataagtcaccatgatacaggagaggttatcgcccgcctgttccgctttcgcgcgcagatcagtcagatcgatgttgccgtttttatcacacgccacaaccaccacctgcattcctgccatatgtgcagaagcggggttagttccgtgcgcagaagccgggatcaggcagatatcgcgatgcccttcgttgcggctttcatgataatgacgaatcgccagcaggcccgcgtattcgccctgtgcgccagagttcggctgcatacaaacggcgtcgtaaccggtcagtttcaccagccagtcagccagctgcgcaatcatctgctgataaccttcggcctgctccggcgggcagaacgggtgcagttcggcaaattccggccaggtgattgggatcatctcggcggcggcgttcagtttcatggtgcaggaacccagcgggatcatcgcctgattcagcgccagatctttacgctccaggctgtgcatatagcgcatcatttcggtttcgctgtggtagcgattaaacaccggatgggtgaggatttcgtcgtcgcgcagcatcgcaggctggatagagcggctgtcgtgagccacgtctttgtccagcgtgtcgatgtccaggccgtggttatcgcccagcagcacgttgaaaagctgcattacgttttcacgcgtggttgtttcatcaagggtgatcccaaccgcgttcagaatatcgctacgcaggttgatttcagccgcttcggcacgcgtcagtacgcccgctttgtcggccacttccacacacaaggtgtcgaaatagtgcgcatggcgcagtttcagacctttttgttgcaggcccgccgccaggatatcggtcagacggtgaatgcggttagcgatacgtttcaggccaaccgggccgtgataaacggcatacaggctggcgatgtttgccagcagtacctgggaagtacaaatgttggagttcgctttctcacggcggatatgttgctcgcgagtctgcatcgccatgcgcagcgcggtattgccagctgcatctttgcttacaccgataatacggcccggcatactgcgtttgtattcatctttcgccgcaaagaatgccgcgtgtgggccaccgtagcccatcggcacgccgaagcgttgcgcgctaccaaaaacaatatccgcgccctgtttacccggcgcagttaacagcaccagcgccataatatcggcggcaacgctgaccacaattttgcgacttttcagttcgctaataagcgcagtgtagtcgtgaatttcaccggtagtgcctacctgctgtaacagcacgccgaagacgtcctgatggtcgagcactttttgcgcgtcatcgacaatcacttcaaaaccaaaggtttcggcacgagtacggaccacatccagcgtttgcggatgcacatcggaagccacgaagaagcggttggcatttttcagtttgctgacgcgtttcgccatcgccattgcttcggcggcagcggtggcctcgtccagaagagaagcagaggccatatccagtccagtcaaatccagcgttacctgctggaagttgagcagtgcttcaaggcggccctgggagacttcaggttgatacggagtgtacgcggtataccagcccggattttccagcatgttacgcaggataaccggcggtagctgcacggcggtgtaacccatgccgatgtaagacgtgaagcgtttattgcgactggcaatagccttgagttctgccagtgcggcgtattcggtcgccggtgcgccaacctgcggtggtgtcgcaagttgaatatctttcggcacaatctggccggtcagcgcgtttaagctttgtgcaccaacggcattcagcatttcttgctgttgcgcggcgtccggtccgatatggcgttcaataaaagcgccgctgttttcaagctggcttaacgtctgtgtcatgagcgatggttcctgaaacgtgcagtgaattgtgaacctctctccttacgaagagagtgagggtgaggcataaattttcctcaccctgatcctctcccgcagaagaggaataaagccgttactcgtcttctaacaatgcttcgtatgcggtcgcatccagcagactttccagttcgctttcatcgctggctttgattttaaagatccagccgcctgcatacggttcgctgttcaccagttccggggaatcgctcagtgcgtcgtttaccgccacgatttcaccgcttactggcgcataaatgtcactcgccgcttttacgctttcggcaaccgcgcagtcatcgcccgcgctaaccgttgcgcccacttccggcaggtcaacaaacaccatatcgcctaacagctcctgagcatgttcggtaataccaacggtgtaagtgccgtcggcttctttacgcagccattcgtgttctttgctgtatttcagttctgctggtacgttgctcatcaatcaatctccaaaaaagtaaatcacgcgacggctttgccgttacgcacaaaaacaggttttgtcactttaaccggcatttcacggttgcgaatttgcacaatcgccgtttcgccaataccttccggcacgcgcgccagcgcaatgctgtaacccagcgtcggggagaaagtaccgctggtgataatgccttcatgctggttgccctgcgcatcggtaaagcgtaccggcagttcattacgcagcacgcctttttcggtcatcaccagaccaaccagtttttctgtaccatgctcacgctgcacttccagggcttcacgaccgataaagtcacgatctgccggttcccaggcgatggtccagcccatgttggcggctaaaggagagatggtttcgtccatctcctgaccataaagattcatgcccgcttccagacgcagcgtgtcacgcgcgcccaagccacatggcttaacacccgcttccaccagcgcacgccagaaatcggccgctttttcattgggcagcgcaatttcatagcccgcttcaccggtataaccagtggtggcaataaacagatcgcccgcctgcacgccaaagaacggtttcatcccttccaccgcctgacgctgggcgtcattaaacagtgtggcagcttttgcctgcgcattcggcccttgcacggcaatcatggaaaggtcatcacgaacggtaatttcgatgccgaaaggttcagcgtgttgggtaatccaggagaggtctttttcgcgggtggcggagttaacaacgaggcggaagaaatcttcagtaaagtagtagacgatgaggtcatctatcacaccgccagaggcattcaacatcccgctgtaaagggctttgccgcttttggtgagcttcgccacatcgttcgccagcagataacgcagaaactcccgggtgcggctgccgcgaagatcgacgatggtcatatgactcacatcaaacattccggcatcggtacgtaccgcatgatgttcgtcgatttggctaccgtaatgcagcggcatcatccagccgtggaaatccaccatgcgagcgccgcaaagcgtgtgttgttcgtacaaaggagtctgttgtgccatcttgtcctcattgaataagcggggctgacaactttttcatggtgaaattatcaccacgaaacccagcatcggagccactcccggtccccaacgcaatcgttctcttttgcctgaacttaccaccgaaacagactgttaaccataaggtaaaattgatcatcacattagcttatggttaaaaaatgcaaaaatcgcgacagaataaaaaaccaaaaaatacaccagtttctatacaaagatgatgtgatgagaaagtcaatttgaataagacaatattaagagctaaaaaaatgtcaaaaaacactaaatcaaaaaataatggcattagaaaatataatgcgaaaacggaggtgaaattagtttatttcaaatgaggaaaatctcccggcgaaaaaaccgggagatgaaagtgtgatgggtatcaaataaacaacagaggagaaatttttaacgcagccattcaggcaaatcgtttaatcccattgcctggcggataagttgcggcttaacgccaggaagcgtgtcggccagtttcaaaccaatatcacgcagcagttttttcgccggattggtaccggaaaacagatcgcggaatccctgcataccagccagcatcaacgccgcactgtgcttgcggctacgctcatagcgacgcagataaatgtactgcccgatgtctttcccctgacgatgcaaccgtttcagttcggcaatcagctctgcagcatccataaagccgagatttaccccctgccccgccagcgggtgaatggtatgtgcggcgtcgcccaccagcgccagacggtggctggcaaactggcgcgcataacgccccgtcagtgggaacacctgacgcgcgctctcaaccttgcataagcccaggcgattatcaaaagcgatatttaacgcgcgattaaattcgtcttcacttgcctgctgcatccgctgcgcttcctctgggctcagactccagacaatgctgcaaagatgcggatcgctaagcggtaaaaaggccagaatgccttcgccatggaaaacctgccgcgccaccgcatcatgcggttcttccgtgcgaatggtcgctaccagcgcgtgatgctgataatcccagaaagtcagcggaatatcggctttgttgcgcaaccaggaattagcgccgtccgcgccaatcaccagacgcgccgttaacatgctgccatctttcagcgtcaggaaggtttcattttctccccaggcgacctgctgtaattctgcgggggctaacagagtgatatcactgctctgatgcgctttgttccacagcgcgtagtgaatcacactattttcaacgatatgcccaagatggctatagcccatgctttgatcgtcaaagctaatgtgaccaaagctgtctttgtcccacacttccataccgtgataacagctggccctacgagagagaatgtcctgccagacgccaagacgggtgagtaatttttcgctggcggcattgatagcgctaacgcgcagttgtggtggtgcattcgccgccagaggttcctgtacgcgctgctccagtacggcaacgcgtaagccgctcccctgtaagccacaggcaaccgccagccccaccatgccgccgccaacaatggctacatcaacactttgcattgtttattccttaaaaccgccttcaacgcgccacccaaccgagggtgcgctgcgccagcacatcgcgtgccggggtgaataattccatcgtcatcagcccgatgttgcgcccgacaaccagcggtgcccaacggttggcaaaaagatgtacaaggctgtccgtgacgccaatggttgcttcgcgatcgctctgtcgacgctgctgataacggcacaatacgccgtaatcccccatgtcttctccgcgctcctgcgcctgagtcagggtttccgcaagactcatcacatctcgcataccgaggttaaacccttgcccggcaatcgggtgcagagtttgcgccgcattgcccaccagcacggtacgatgggtaatagatctggcggcgtgggttaacgccagcggataagcactgcgtttaccagcgtgggtaattttcccaagtcgccagccaaaggcgctctggagttcacggcaaaacttctcgtcactccagctcaacacctcttcgcgccgttccagtggatgacaccagaccaggctacagcgtccgtcagacatcggcaacatcgccagcgggccatgttgcgtaaagcgttcaaaagcgcgcccttcatgcgcaacggaagtagcaacgttggcaatcacggccagttgttcgtaaggctcctgctgccagtcaacgccgcacgcggtggctaacgcactatgggtgccatcagctgctaccagcacgcggcccgtcagcgtctcgccactctccagcgtcacttcaacgtgactctgagtacgggcaacgttagccacgcgatcagggcaatgcagcgttacgccaggtgctttacgcagcaatgcaaacagccgttgcccgacattgtgcaattcgacaacctgtcccagcgccgccagttggtaatcttctgcggcgagggtgacaaatccagcgtgaccacgatcgctgacatgcacggtggtgatggcagttgcgcaatccgccagagattgccagacgccgatgcgcgccagttgctgacaggtacccgccgccagcgctatcgctcgtccatcaaagcccggatgagcatgactctctggcgcagtcgcttcaatcaaatgtaccggcagcgccccgtgacttaaccgggaaatagccagcgccagcgtcgcgcccgccatgccgccaccgacgatgattacgctcattgctttctcgcagcaaccatcaacgcttcgatttcttccggctttttcaccacgctggcggtgaggttttcgttaccggtttcggtaatcacaatgtcgtcttcaatacgaatgccgataccgcgatattgttctggcacttctgcatccggcgcaatatacagccctggctctacggtcagtaccatgcccggttccagaatgcggctgcgatcctgaccataaacacccacgtcatggacatccagtcctaaccagtggctaaggccatgcataaagaaaggacgatgggcgttctgagcgatcagttcatcaacatcacctttcaggatgccgagttttaccaggccgctaaccatgatgcgcaccacttcaccagtgacttccagaatggaagttcccggacgatacaggcgcaggctggtttcgagagactccagcacaatgtcgtagatttcacgctgggcctgggtgaatttgccgttgaccgggaaggtgcgggtaatatcgccagcgtaacctttgtattcacaacccgcgtcaatcaacaccaggtcgccgtcgcgcatttcacactcgttttcggtgtagtgcagaatgcagccgttttcaccgctgccgacaatggtgttataggacggatagcgcgcaccgtggcggttaaattcgtggtgaatttcgccttccagatggtactcgaacattcccggacggcatttttccatcgcccgtgtatgtgccatggcggtgatttctcccgcgcggcggagtacggcaatctcttctgggcttttgaacaggcgcatttcatgaacaacaggacgccagtcgatcatcgttgccggtgcggtgagattttgccggctacctttacgcagtttttccagcgcactgttcacgattacatcagcatatgcatattcgccctgggcatggtaaaccacatccaggccgttaagtagttgataaagttgctgattgatttcgctgaatgccagtgcgcggtcaacgcccagtttctctggcgcggcatcctggcctaagcgacggccaaaccagatctccgccgtcaggtcgcgaacgcggttaaacagaacgctgtggttatgagtgtcatcgcttttaatcagcaccagcaccgcttccggttcgttaaagccggtgaagtaccagaagtcactgttctgacgataggggtattcgctgtcggcgctacgtgttacttctggtgcagcaaaaatcagcgcggcgctgccgggttgcatttgctccaccagggcctgacggcgacgctgaaactcttgccgggatatctcactcataacactctccttacgttttttgtttttagtgtagagtcggtttttgtacttctggcgcggtcggttgcggatgagtaaaggtgtcgtggcataacagcgcggcaacacgaacgtattcgatgatctcttcaaggctcatttcaagctcttcctgatcttcgtcttcgtcgtaacccagttgcgcaatgttacgcagatcgtcgatagcttcaccggtttcgccggtcactttatccagcttcggttgcgtaacgccaagaccaagcaggaagtgattgacccaacctgccaatgcatcagcccgatcgaaaacgctgacatcatcgccatcaggcagataaagctgaaaaaggaagccgtcatcctgcagggcatcgctggtggcagagtgcattttacgcagtgcctgtgccagctcatgaccgaaagccatgccttcgttcgtcaggtcgtgaagtagcggtagccaactgctgtcatcgttaccgccacatatcatcccgctgattaaaccatgcatctcagctggggtcagacccgtcccttgttggttcagatactggttcatttcgttgtaaccaggcatttcgttctgtatagacataagcattcgtcgtcaaagggaggaatattcatgatatgctaccactttgggccctggtggaccagaaaagggcttgtctcttctcatcagggtagctatagtgtcgccccttcgcagaccatgggtctaaagacgaaggcagcgcagtcaatcagcaggaaggtggcatgtctgcacaacccgtcgatatccaaatttttggccgtagtctgcgtgtgaactgcccgcctgaccaaagggatgcgttgaatcaggcagcggacgatctgaaccaacggttgcaagatctgaaagaacgcactagagtcacaaatactgaacagttggtcttcattgccgcattgaatatcagctatgagttagcgcaagaaaaagcaaagactcgtgactacgcggcaagtatggaacagcgtattcggatgctgcagcagaccatagaacaagcgttacttgaacaaggtcgcatcaccgaaaaaactaaccaaaactttgaatgacacttttcggtttactgtggtagagtaaccgtgaagacaaaatttctctgagatgttcgcaagcgggccagtcccctgagccgatatttcataccacaagaatgtggcgctccgcggttggtgagcatgctcggtccgtccgagaagccttaaaactgcgacgacacattcaccttgaaccaagggttcaagggttacagcctgcggcggcatctcggagattcccttcttatctggcaccagccatgacgcaactaccagaactcccactgacattatcccgacaagaaatccgcaaaatgattcggcaacgtcgtcgtgcgttaacgccggaacaacagcaggaaatgggtcaacaagccgctacccggatgatgacttatcccccggtggtgatggcacatacggtcgctgtattcctctcttttgatggcgaactcgacacccagccactcatagaacaactctggcgcgccggtaagcgcgtatatcttccagttttgcatccctttagtgccggtaatttgctgttcctgaattaccatccgcaaagcgaactggtgatgaacaggttgaagatccatgagccaaaattggatgtgcgtgacgtgctacccctttcccgattagacgtgctgatcacaccgctggtcgcctttgatgagtacggtcagcgcctgggaatgggcggtggtttttatgatcggaccttacaaaactggcagcactataaaacgcaaccggtgggttatgcgcatgattgtcagttggtggaaaaactccccgttgaagagtgggatatccctcttcctgcggtggttacaccgagcaaagtctgggagtggtaagggcgatacacccgcatcgccctgattgacatcgttgattctttgacctaatttagtgagtaagggtaagggaggattgctcctcccctgagactgactgttaataagcgctgaaacttatgagtaacagtacaatcagtatgatgacaagtcgcatcataacccttctccttcaagccctcgcttcggtgagggctttaccgttacagccccatgctgccctgccatcgtaaatccccattaaataaacacaacgcattgatctgactttgatttattttctggagcagactcgcaaagtagaatgcgcaacgcggcaacggtgtggagaagggataaaaaaacgggcaagtcagtgacctgcccgttgattttcagagaaggggaattagtacagcagacgggcgcgaatggtacccggaatagctttcattgcctgcagcgctttttcggcaacgtcttcgtcggcttcaatatcaataaccacataacccatctgggcggaagtttgcagatattgcgcggcgatgttgacgccctgctcggcgaagattttgttcagcgcagttagcacgcccggacggttttcgtggatgtgcatcagacgacgcccaccgtgcagtggcaggctgacttccgggaagttcaccgcagagagcgtactgccattgtcagaatacttgatcaatttacccgcaacttccaggccgatattctcctgcgcttcctgagtgctaccgccaatgtgtggcgtcagaaggacgttgtcgaattcacacagcggagaggtaaatggatcgctattggtcgccggttccgtcgggaatacgtcgattgccgcccccgccagatgtttgctcgccagcgcatcacacagcgccggaatatccaccacagtaccgcggctagcattaatcagcaggctgccgggcttcattagactaatttctttcgcgcccatcatatttttggtggacggattctctggtacatgcagactcaccacatcgctcatattcagcaggtcagaaagatgctgtacctgagtggcgttgcccagcggcagtttattttcaatatcataaaagtaaacatacattcccaggctttcagccagaatgcccaattgcgtaccaatatgaccgtagccgatgatacccagctttttgccgcgcgcttcaaaagaacccgccgccagtttgttccacacgccacggtgcgctttagcattggcttccggcacgccgcgcaatagcagcagcagttcgccaatcaccagctccgcaacagagcgcgtattactgaacggtgcgttaaataccgggatcccgcgctttgccgccgcatccagatcaacctggtttgttccgatacagaaacagccaatagcgaccagtttttctgcggcgttgatcacgtcttcagtcagatgggtacgggatcgcaggccgatgaagtgggcatcgcggatggattcttttaattgttcatcatccagcgcgcctttgtgaaattcgatgttggtgtaaccagctgcacgaaggctttccagcgccttttggtgcacgccttctaccagcagaaacttaatcttgtctttctccaggcttacctttgccatttacccaatcctgtcttttgaaatgttgtgtgcggatttgcatccgcctttcaacatatcaaaaaataatattgcggcaatatgaacgtttgcgtcgcgatgttgaggaaatatcacgcaaaggtaattcttggatgaatatgctggtttagaggatttatttagagcaatcgacaattgcctggtaaaagcgtgacacatgtcaccaaatttaatgaagagaatttttttaacgggggaggttcccccgtcagatcatttcacaatggttttgacaccgtcaggtgtgccaatcagcgcaacgtccgcgccacggttagcaaacaagccaacagtcaccacgccaggaatcgcatttatggcgttttccatcgctatcgggtcaaggatttccatgccgtggacgtcgaggatcacgttgccattatcggtcaccacgccctgacggtattccggacgaccgcccagtttcaccagctgacgcgccactgcactacgtgccatcgggataacttctactggcagcgggaatttacccagaatatcaacctgcttggaagcgtctgcaatacagataaatttttctgcaacgctagcaatgattttttcacgggtcagcgccgcgccgccgcctttgatcatttgcatgtggccgttgatttcatctgcgccatcaacgtagatgccaaggctgtcgacttcgttgagatcaaaaacgtgaatgccgaggcttttcagtttttcagtggaagcatcactactggaaacggccccttcaatctggcctttcattgtaccgagcgcgtcaataaagtgtgcggcggtggaacctgtacctacaccaacaatggtgccgggctgaacatactgaagtgccgcccatcctactgcttttttcaattcatcctgcgtcatgatcgtttcgcctgtggtatgaaatttcacacgcattatatacaaaaaaagcgattcagaccccgttggcaagccgcgtggttaactcatccataaaatatcgcgcaatggcaggcatcccctttcgccccgcaaataaagcatacaacggtctgggtatgccgctccacggtgcaaacaggcgcaccagttcaccgttcgcaagcccctgtttacaggcaaattgaggcaataacgccacgccattcaacacaaccagggcgcgaactcgctgagcgaaatgcattagcgcaaatccctgatcttttaagctgcgcttttaaccacggatacaaatgttacccgccgacggcttcggtatatgcaacctgacacaaaattgtgtcatagtgcaggaaaaagcatttaccaggagcagacaacagcaatgaaacgcccggactacagaacattacaggcactggatgcggtgatacgtgaacgaggatttgagcgcgcggcacaaaagctgtgcattacacaaagtgccgtcagtcagcgcattaagcaactggaaaatatgttcgggcagccgctgttggtgcgtaccgtaccgccgcgcccgacggaacaagggcaaaaactgctggcactgctgcgccaggtggagttgctggaagaagagtggctgggcgatgaacaaaccggtagcactccgctgctgcttagtctggcggtcaacgccgacagtctggcgacgtggttgcttcctgcactggctcctgtgttggctgatagccctatccgcctcaacttgcaggtagaagatgaaacccgcactcaggaacgtctgcgccgcggcgaagtggtcggcgcggtgagtattcaacatcaggcgctgccgagttgtcttgtcgataaacttggtgcgctcgactatctgttcgtcagcagtaaaccctttgccgaaaaatatttccctaacggcgtaacgcgtagcgcattactgaaagcgccagtggtcgcgtttgaccatcttgacgatatgcaccaggcctttttgcagcaaaacttcgatctgcctccaggcagcgtgccctgccatatcgttaattctagtgaagcgttcgtacaacttgctcgccagggcaccacctgctgtatgatcccgcacctgcaaatcgagaaagagctggccagcggtgaactgattgacttaacgcctgggctatttcaacgacggatgctctactggcaccgctttgctcctgaaagccgcatgatgcgtaaagtcactgatgcgttactcgattatggtcacaaagtccttcgtcaggattaatccatcaaataatgcctgatagcacatatcaggcgttgtcctcacttctttttgtattccttgaatcacatcacaaaatagacaaatctcaggcggcaaaaaacgacgtctgaatgcattttttttgctggcgacaaacccacgtaaaaagctcaccgtaggcgcaaataccctcattttgattgcgttttacggagcaaataatgtctaacgtgcaggagtggcaacagcttgccaacaaggaattgagccgtcgggagaaaactgtcgacagcctggttcatcaaaccgcggaagggatcgccatcaagccgctgtataccgaagccgatctcgataatctggaggtgacaggtacccttcctggtttgccgccctacgttcgtggcccgcgtgccactatgtataccgcccaaccgtggaccatccgtcagtatgctggttttagtacagcaaaagagtccaacgctttttatcgccgtaacctggccgccgggcaaaaaggtctttccgttgcgtttgaccttgccacccaccgtggctacgactccgataacccgcgcgtggcgggcgacgtcggcaaagcgggcgtcgctatcgacaccgtggaagatatgaaagtcctgttcgaccagatcccgctggataaaatgagcgttagcatgaccatgaatggcgcagtgctaccagtactggcgttttatatcgtcgccgcagaagagcaaggtgttacacctgataaactgaccggcaccattcaaaacgatattctcaaagagtacctctgccgcaacacctatatttacccaccaaaaccgagtatgcgcattatcgccgacatcatcgcctggtgttccggcaacatgccgcgatttaataccatcagtatcagcggttaccacatgggtgaagcgggtgccaactgcgtgcagcaggtagcatttacgctcgctgatgggattgagtacatcaaagcagcaatctctgccggactgaaaattgatgacttcgctcctcgcctgagcttcttcttcggcatcggcatggatctgtttatgaacgtcgccatgttgcgtgcggcacgttatttatggagcgaagcggtcagtggatttggcgcacaggacccgaaaagtctggcgctgcgtacccactgccagaccagtggctggagcctgactgaacaggatccgtataacaacgttatccgcaccaccattgaagcgctggctgcgacgctgggcggtactcagagtctgcataccaacgcctttgacgaagcgcttggtttgcctaccgatttcagtgcacgcattgcccgcaacacccagatcatcatccaggaagaaagtgaactctgccgcaccgtcgatccactggccggatcctattacattgagagcctgaccgatcaaatcgtcaaacaagccagagctattatccaacagatcgacgaagccggtggcatggcgaaagcgatcgaagcaggtctgccaaaacgaatgatcgaagaggccagtgcgcgcgaacagagcctgatcgaccagggcaagcgtgtcatcgttggtgtcaacaagtacaaactggatcacgaagacgaaaccgatgtacttgagatcgacaacgtgatggtgcgtaacgagcaaattgctagcctggaacgcattcgcgccacccgtgatgatgccgccgtaaccgccgcgttgaacgccctgactcacgccgcacagcataacgaaaacctgctggctgccgctgttaatgccgctcgcgttcgcgccaccctgggtgaaatttccgatgcgctggaagtcgctttcgaccgttatctggtgccaagccagtgtgttaccggcgtgattgcgcaaagctatcatcagtctgagaaaagcgcctccgagttcgatgccattgttgcgcaaacggagcagttccttgccgacaatggtcgtcgcccgcgcattctgatcgctaagatgggccaggatggacacgatcgcggcgcgaaagtgatcgccagcgcctattccgatctcggtttcgacgtagatttaagcccgatgttctctacacctgaagagatcgcccgcctggccgtagaaaacgacgttcacgtagtgggcgcatccagtctggctgccggtcataaaacgctgatcccggaactggtcgaagcgctgaaaaaatggggacgcgaagatatctgcgtggtcgcgggtggcgtcattccgccgcaggattacgccttcctgcaagagcgcggcgtggcggcgatttatggtccaggtacacctatgctcgacagtgtgcgcgacgtactgaatctgataagccagcatcatgattaatgaagccacgctggcagaaagtattcgccgcttacgtcagggtgagcgtgccacactcgcccaggccatgacgctggtggaaagccgtcacccgcgtcatcaggcactaagtacgcagctgcttgatgccattatgccgtactgcggtaacaccctgcgactgggcgttaccggcacccccggcgcggggaaaagtacctttcttgaggcctttggcatgttgttgattcgagagggattaaaggtcgcggttattgcggtcgatcccagcagcccggtcactggcggtagcattctcggggataaaacccgcatgaatgacctggcgcgtgccgaagcggcgtttattcgcccggtaccatcctccggtcatctgggcggtgccagtcagcgagcgcgggaattaatgctgttatgcgaagcagcgggttatgacgtagtgattgtcgaaacggttggcgtcgggcagagcgaaacagaagtcgcccgcatggtggactgttttatcagcttgcaaattgccggtggcggcgatgatctgcagggcattaaaaaagggctgatggaagtggctgatctgatcgttatcaacaaagacgatggcgataaccataccaatgtcgccattgcccggcatatgtacgagagtgccctgcatattctgcgacgtaaatacgacgaatggcagccacgggttctgacttgtagcgcactggaaaaacgtggaatcgatgagatctggcacgccatcatcgacttcaaaaccgcgctaactgccagtggtcgtttacaacaagtgcggcaacaacaaagcgtggaatggctgcgtaagcagaccgaagaagaagtactgaatcacctgttcgcgaatgaagatttcgatcgctattaccgccagacgcttttagcggtcaaaaacaatacgctcagtccgcgcaccggcctgcggcagctcagtgaatttatccagacgcaatattttgattaaaggaatttttatgtcttatcagtatgttaacgttgtcactatcaacaaagtggcggtcattgagtttaactatggccgaaaacttaatgccttaagtaaagtctttattgatgatcttatgcaggcgttaagcgatctcaaccggccggaaattcgctgtatcattttgcgcgcaccgagtggatccaaagtcttctccgcaggtcacgatattcacgaactgccgtctggcggtcgcgatccgctctcctatgatgatccattgcgtcaaatcacccgcatgatccaaaaattcccgaaaccgatcattagcatggtggaaggtagtgtttggggtggcgcatttgaaatgatcatgagttccgatctgatcatcgccgccagtaccagtaccttcagtatgacgcctgtaaacctcggcgtcccgtataacctggtcggcattcacaacctgacccgcgacgcgggcttccacattgtcaaagagctgatttttaccgctagcccaatcaccgcccagcgcgcgctggctgtcggcatcctcaaccatgttgtggaagtggaagaactggaagatttcaccttacaaatggcgcaccacatctctgagaaagcgccgttagccattgccgttatcaaagaagagctgcgtgtactgggcgaagcacacaccatgaactccgatgaatttgaacgtattcaggggatgcgccgcgcggtgtatgacagcgaagattaccaggaagggatgaacgctttcctcgaaaaacgtaaacctaatttcgttggtcattaatccctgcgaacgaaggagtaaaaatggaaactcagtggacaaggatgaccgccaatgaagcggcagaaattatccagcataacgacatggtggcatttagcggctttaccccggcgggtagcccgaaagccctacccaccgcgattgcccgcagagctaacgaacagcatgaggccaaaaagccgtatcaaattcgccttctgacgggtgcgagtatcagcgccgccgctgacgatgtactttctgacgccgatgctgtttcctggcgtgcgccatatcaaacaagctccggtttacgtaaaaagatcaatcagggcgcggtgagtttcgttgacctgcatttgagcgaagtggcgcaaatggtcaattacggtttcttcggcgacattgatgttgccgtcattgaagcaagcgcactggcaccggatggtcgagtctggttaaccagcgggatcggtaatgcgccgacctggctgctgcgggcgaagaaagtgatcattgaactcaatcactatcacgatccgcgcgttgcagaactggcggatattgtgattcctggcgcgccaccgcggcgcaatagcgtgagcatcttccatgcaatggatcgcgtcggtacccgctatgtgcaaatcgatccgaaaaagattgtcgccgtcgtggaaaccaacttgcccgacgccggtaatatgctggataagcaaaatcccatgtgccagcagattgccgataacgtggtcacgttcttattgcaggaaatggcgcatgggcgtattccgccggaatttctgccgctgcaaagtggcgtgggcaatatcaataatgcggtaatggcgcgtctgggggaaaacccggtaattcctccgtttatgatgtatagcgaagtgctacaggaaagcgtggtgcatttactggaaaccggcaaaatcagcggggccagcgcctccagcctgacaatcagcgccgattccctgcgcaagatttacgacaatatggattactttgccagccgcattgtgttgcgtccgcaggagatttccaataacccggaaatcatccgtcgtctgggcgtcatcgctctgaacgtcggcctggagtttgatatttacgggcatgccaacagtacacacgtagccggggtcgatctgatgaacggcatcggcggcagcggtgattttgaacgcaacgcgtatctgagcatctttatggccccgagcattgctaaagaaggcaagatcagtaccgtcgtgccaatgtgcagccatgttgatcacagcgaacacagcgtcaaagtgatcatcaccgaacaagggatcgccgatctgcgcggtctttccccgcttcaacgcgcccgcactatcattgataattgtgcacatcctatgtatcgggattatctgcatcgctatctggaaaatgcgcctggcggacatattcaccacgatcttagccacgtcttcgacttacaccgtaatttaattgcaaccggcagcatgctgggttaatgactcgtcccgtcacgatcttcagcaatatgctgaagcatcgtggcggtataacgatgatttctgatactataaagatattcctgcatatacatcggcctgtgcggtgcatcaaaatatttcagcgttgccggattcaccagtcgccaggcaaaatgcgggatcaccgtcagaaaatgtccgcgctccacggcgctgattttggccataaaactgtagggacgataaataatggttggattgatcccacaaggtcgcatattcgcatcaatcattgcttcgaagttggcccggttctgaaagcgcatttgtagccagggcagctcctgaagcagctcttgctcttgtcgctcttcataacggcgagaaacgagaaagcctaatcgcagcggtggtagttcactgatagtcaggttttccagttcctgaactcgtgcagatacatgctgtggggagataataaaatctaactggcggtcaaaaagattatcgataacgccattttcgctgaactcaactggctgggcggtcacgccttcatacttatctccgagactaatcaactgatcgaaaataattgtcggataagtattatctatgccaatcacaatttctcgactacgacgcccactgttatggatttcattatcaatcgcagaaagccgttgataaaccgggaacagtttttgatacagttcctgtccggctttattgaggctgatattattatctttgcgggtaaatagcgtatagccaatttgttcttccagcgcggcaatgcttttaccaaatgggctagccgtcatatggattttttctgccgcccgggcaatattattggtttgcgctaataaaatgaaattgcgcatctttttgctaataaaaatgtccatccccctcccccgcatccttgtccgcttaaccgtttcagtcagcctatccttgatgaaaccgcgagcaaagataggtgattacgtcatggttttacagaaaattacagaaaaaggaggcaatatcgggtaaaggcattagcccgacgaatacgtcgggctacaaatattattgtgctgcaggtgttttagcgggttgttgatccacaggttctaactggaagaccacatcgacctgatcatcaaactgaatagcggcctgctcgtaagtttcctgggcggacaccggcgcggcatcggctttcatcatccgcaccattgggctgggctgatagttggaaacatggtagcgcacgctatataccggccccagtttacgatgaaagccgttcgccagttcctgcgcctgatgaatcgcgttatcaatcgctgccttacgcgctttgtctttataggcatccggctgcgccacgcccaggctcacagaacgaatttcgttaagacccgccttcagcgcgccatccagcaaggaattcagtttgtctaactgacggagcgtgacttccaccgttctcacagcgcggtagcctttaaggatacttttaccatcctgataatcataatctggctgggtgcgtaagttcgcactgctgatatcttttttcgcgatctgattgagttcaaggaaggaaatgtattgtgcgacgcgctcatctgcctgtttcttggcagtagcggcatccttcgcggccacgttaacttcaatcgcaagagtggcaatgtctggcaccgcatccacgcttgccgtaccggaggtgacaatatgcggtccatccggcaattcgttagcctgcgctgccatcccgctaatacccattaatgccgccagggcgataactttgaacttcacgttagtctctccgtgttaattgacttgcccaaaattcaggacctctggaggcaagcttagcgcctctgttttatttttccatcagatagcgcttaactgaacaaggcttgtgcatgagcaataccgtctctcgccagctgcaaggcaataaaccacataacacatcccacaaccagattgataatgcgctgtgcttttgccgtgcgcagacgcggtgccagccaggctgcgagaagagccagaccaaagaaccacaggaaagaggcgctaattgtcccgagtgcaaaccagcgttttggttccacatcaagttgcccgccaaggctgcccagtacaacaaaagtatccaggtaaacatgcggattcagccaggtcactgccaacatggtggcgataattttccatctgccttgcttcatgacttcggcgctggctaactcaatattactgctcattgctgttttaaaagcgccaaaaccataccacagcaagaaggctacgccgccccaggtgaccagcgccagcaaccacgggctctgcatcaataacgcgctgccaccaaaaatcccggcgcaaatcaggaccaaatcgctgatagcacaaagtaaggcaatcataatgtggtactgacgacgtatgccctgattcatcacaaaagcattttgtggaccgagcggtaggatcatagccgccccaagtgcaagaccttgaaagtaataagaaaacacgttggatattccgaattaagtatctgatgcagagactatatcgcgggattgttattagcggaaattgataatattaattggcaatcagaaaaactaataagagagaggccagagagtattatctggcctcagcgttgattacgcagctttgtcttctttcacccgcttaaagttcacatccatttgcgggtacgggaagctgataccggcggcatcaaattcacgtttaatacgctccagcacatcccagtacacgttttgcagatcgccgctgttgctccagacgcggaccacgaaattaatgctgcttgcaccaagttcgttcaggcgcacagtcatttcgcgatctttcaaaatgcgatcttcagactggataatattggtcaggatctgcttaacctgatcgatatcggaatcatacgccacgccaataataaattcgttacggcgaactggctcgcgggagaagttaataatatttccggcaataattttaccgttcggaataacgataattttaccgtctgcagtacgcatggtggtggagaaaatctgcacactcagcacagtaccggctacgccgcccaggtcaacatattctccggcacggaacgggcggaacatgacaagtaacacgccagcggccaggttagacagactcccctgcaaagccagaccaacagctaagcctgcggcaccgagtacagcaatgacactcgcggtttgtacacccacgcgtcccagtgcagcgattagcgtaaaggcgataataccgtaacggactaatgcagaaagaaaatcagcaacagtggcatcgattttacgggagatcatcaggcgattcaccgcgttggaaatcatccgcgcgataatcaaaccaacgatgatgatcgcgagtgccgccacgatgtttactgcataacttagcagcagcgcctggttagctaccagccagcttcccgcgccgtttatgctatcgacaacattcaaatcttccattcaatattccttttcaactgactcaaaatggagaaatacactccgccgccttatgacgggcagtctgacaagggtaaacaataaagcataattttgccaaatagatcacagatttctcatctgaatcaccttgcttttggcgaaaaaatccccgcagagcggggctcagacagatatcaatgtgcgctttgtcatgccggatgcggcgtgaacgccttatccggcctacaaaaacctgcaaattcaatatattgcaggatacgtgtaggcctgataagcgtagcgcatcaggcaattttgcttttggcgaaaaaaagacccgcagagcgggccttgagataagcagaaaggaatatcttacagaacgtcgatcgcgttcagttcctggaatgctttctccagacgagcgatcatgctagtctgaccggcacgcagccatacgcgcggatcgtagtatttcttgttcggctgatcttcgcctttcgggttacccagctgaccctgcagataagcttcgttcgctttgtagtagttcagaacgccttcccaggttgcccattgggtatcggtatcgatgttcatttttactacgccgtagcttacggagtctttgatttcctgagcagtagaaccggaaccaccgtggaatacgaagttcaggctgttgtgcggcaggttgtgtttcttggaaacatattcctgagaatcacgcaggatggtcggagtcagaaccacgttacccggcttgtaaacaccgtgtacgttaccgaaggacgctgcgatggtgaaacgcgggctgattttgctcagttcggtgtatgcgtaatcaacgtcttccggctgggtgtacagtgcagaagcgtccatgtggctgttgtccacgccgtcttcttcaccaccggtgcaacccagttcgatttccagagtcatgccgattttggacatgcgctccaggtatttagagcagatttcgatgttctcttgcagagattcttcagacaggtcgatcatgtgagaagagaacagcggcttaccggtagctgcgaagtgtttttcacccgcgtccaacagaccgtcgatccacggcagcagtttcttcgcgcagtggtcagtgtgcaggataaccggaacaccataatgttcagccatctggtgaacgtgatgcgcaccagagatcgcgcccaggatagcagcaccctgcggaacgtcagatttcacgcctttaccagcgataaaggaagcaccaccgttggagaactgaacgataaccggcgctttaactttagcagcggtttccagtacggcgttgatggagtcagtaccgacgcagtttactgctggcagtgcgaagttgttttcttttgctacctggaaaactttctgtacgtcatcaccagtgattacgccaggttttacgaaatcaaaaatcttagacatgtctcttgtcctgtatcgtcgggccttatactcgtcatacttcaagttgcatgtgctgcgtctgcgttcgctcaccccagtcacttacttatgtaagctcctggggattcactctcttgtcgccttcctgcaactcgaattatttagagtatgaaaaattgcgtgctctaaaagcgcgctgaaacaagggcaggtttccctgccctgtgattttttacttcttagcgcgctcttcgagcatcgctactgcaggcagtactttaccttccacgaattcgaggaatgcgccgccgccagtggagatgtaggagattttgtcagcaatgccgaacaggtcgattgctgccagagtgtcgccgccgccagcgatggagaacgcttcgctgtctgcgatagcgttagccacgatttcagtacctttgcggaagttcgggaattcgaacacgccaaccggaccgttccacagaatggttttcgcattcttcaggatttcagccagttcctgagcggaagcatcaccgatatccaggatctgctcgtcagctttcacatcgttaacagatttcagggtagccggtgcagtttcagagaactcggttgctacgcgaacatcagacggaaccgggatgttgcaggtggtcagcagacgtttagcttcgtcaaccaggtcagcttcgtacagggatttacccacatcgtggccttgtgccgcgataaaggtgttagcgataccaccaccaacaatcagctggtcagcgattttagacagggagtccagaacggtcagtttggtagatactttagaaccaccaacgatagccaccatcgggcgagcaggttctttcagtgctttacccagcgcgtccagttcagctgccagcagcgggcctgcgcacgcaacgtcagcgaatttaccgataccgtgagtagaagcctgcgcgcggtgagcagtaccgaatgcgtccattacgaacacgtcacacagtgcagcgtattttttggacagggtttcgtcgtctttcttctcgcctttgttgaagcgaacgttttccagaacaaccagttcaccttcagcaacgtcaacgccgtcgaggtaatctttaaccagacgaaccgggttagacagtttgtctttcaggtagttaacaaccggcagcagagagaattcttcgttgtactcgccttcggtaggacgacccaggtgggaagttaccatcacttttgcgccttgtttcagggccagttcgatggtcggcagagaagcacggatacgcgcgtcgctggttactttcccgtcttttactggtacgttcagatccgcacggataaatacacgtttcccagcaagatccagatcggtcatcttaattacagacatggtgaatcctctcgttgattctaaaagttttgcagacgctgcttgcgtcttacctgaaagcaacagtagccatagctaacgtcgtgtcgagcattcggttagcaaagccccattcgttatcgcaccagaccaacgttttgatcaggtgtgcgccactgacccgggtttgggtgccatcgacaatggcactgtgcggatcgtggttaaaatctacagagaccaacggcaattccgtatagtcaactataccatgaaatgcaccttgtgctgctttttgcagcaacaggttgacttcattggcttttacaggtttcttcaccgtcacgcttaaatcgattgccgtcacatttatggttggcacacgtaccgcaatcgcttcaaagcgatcgttaaattgcggaaaaaatcgtgtgataccggcggccagtttagtatcgaccggaatgatgctctggctggctgcccgggtgcgacgcaggtcaggatggtatgcatcaataacctgttgatcgtgcatggcggagtgaattgtggtcacagtgccggactcaataccgtacgcatcatctaacaatttgatgacgggaattatgcaattcgtggtacaggaagcgttagaaacgatgcggtgttccgcacgaagttgatcctgattgacgccgtaaacaacggtcgcgtcgagatcgttactgccaggatgactaaagagcacttttttggccccggcggcaatatgcgcttcgccatgctcgcgggagccatatacgccggtgcagtcgaggactacatcaacgccaagttcacgccaggggaggctttgcagactacgttcatgcaatacgcggatggcgtcatcaccaacaaaaagttgatcgcgttcctgtcgtacttcccatgcaaaacggccatggctggtgtcatatttcaacaaatgcgccatgcccgcagcatccgccagttcgttgattgccaccacggtaatttccgcccggcgtccggattcatacaaagcacgaaccacattacgcccgatgcgaccgaagccatttatcgctacgcgtacggtcatagatctcctgcaaggttttccctgagcaaatttgccagacagagtaatccagcaaatcgtccggggaaaccttacctgtcgcaaactgcgactgattggttaattgtcgaacatttaatcgactgaaacgcttcagctaggataagcgaaacgtggaataaaaggaatgtttgtccagccgaagaagacatttatctgactcacatcacacttttatccccttttgtgggaagctttattccaggctggcgtaataataaccctacaataactggaataaattgtcagcttgtgaagtgataccggccttcttcagtcatctctactatcagattggcctgacggctattcatcagcacacgctcgacattggggccatcggtgcgggcataaaatgcttcggctacttgccgcgttaatcctcccgcaattttacgactaatcaagcgctcccgcagaatttgagcaggtgcatgaataaaaatagaaaaatcgcagaaagatgccaactccagccacttttcatcatccagtaacaaccagtttccttcgacgatgacgagtggtgcggtaacgtgcaacgcatcttcaacaggatcatgcttttgtcgatcgtactgcggccacgtacaatccccttccacgacctggcgcagattttccgtcagtttcgcaacgtcaaatgtctctggtgcgcctttgaaggggcgcaattgatgcgcatccagccagctattgtaatggtgaaaaccatccatcgggagcgtctgaatagcgggcagttccgggtcttgttgcgcgagatattcccagaaggtggttagggtacttttacccgtccccggcggagcgcaaagaaaaaccaccgtacgccgctgcggatttaccgtctgtaaggccgccaacatgtgcagcaacggtttatgtacattttcaatctcttcgttctggtactgtgcctgtatcttcagcccattcaccgttaattcaattttcacggcgttaattcctttaaggtggtcgttactgccagcgtcagcgccgttttgaccattccgctaaaacgcgcctcactccagacggagaaatcagcgaacttcatcgcttttaacgcgtcatagagcatcgcattgcgggttatgctattgacgttgctgataaaatcccaggtcatgtcatcggcaaatccgggcgtttcatcctgttcgttcaggtaatgccagaactgggaaaaatgcgtgatatcggcgtacaaccatttatccattttccccaacgcataaatcaaacgcagtgcaacatcaatatcgtcaagcgggccgctttgggcgagtaacggcttcactgcatattccacgatctcttcatcgttatcgacaaacaggctcggcagaaactggcgtatcccctggagcaaaatggtatgcgcagttttcataaaactaaataaattgtcctgtgcatccagttgctcaagcacatcatcttctgtcagcgtcgccattggtcttccgatagatcaccatcaatgcagggagtctattatattacacgtttggtccgcgccgccgatcagtaatgtctgcgtccgcaccccattcgccgtctgttggataccgttcaccagctcaccgcccgtcacgcccgtagcgctaaagaggatatcgttccccctcaccagttcatcgaggctgtacacacggttaacgtcaacgcccattgccttgcaacgcttgcgctcctgctctgcaatctgccgattttccgtgtaatcccctttagcctggcaaaagtcaatcagctcggcctgcatatccccgcctaatgctttaacggcacaggcagaaatcacgccttctggcgcaccgccgatggtgtacatcacatcgtaaggattatcctgccagcaggtcagcacgctggcggcgacatcgccatccggcagggcaaaaaccttcacgcccagctgtgttgcttcctcaatcgcggcactcaggcgcggtttatccagcgtaaccatgcgcagcttatccagcggtttgcctaacgctttcgccacgttgcgcaggttgtccgtcagaggcaaagacagatcaatcgcgcccgccgccagccgattaacaaccagctttttcatatacatatcgggcgcatgtaacaggctatctcgaggggcgaaagccatgaccgccagcgcattgctctgccccatcgccaccatccgcgtgccttcaatgggatcaaccgcgatatcgacttctggcccatcgcctttgcccacctcttcgccaatccacagcatcggcgcatggtcaatttctccttcgccgataaccactcgtccacgaaaagcgacgtcgtttaatgcctggcgcatcgcggtgaccgccaggccatcaattttatttttgtcgccacatccggtttgcggccaggcagccaacgctgcctgttccgtaacgcgaaataatggccacgccagggacatcattgcgcggcctccccgatatcaacgccaaattgtgccagcagatatttctcggcctgttcattccagatgccgtgcgtttcctcaaccagccgcgccaactctttaaacagcggatcggttttgcctttttcggcaaaatcggcaatggcagtgagcggcatggtcacgccgttataaatgagttttttaccgccagggatatccggcagattgagcacggtttctggcaccgcatccaggccaccgatatgggtcaccataaagctcggctgtaactgcccagtggcgctaagggcaatcgcctctttcatgtcgtccgtactaccgccagatgtaccgacgacgtgcgtgctgttgtaatggacgttgtagaaattaaacggcactttgaagtttttatccgtcggcccggcaaagaagttcagacagccatcttccgccagtaattcatcagccatctcaacgacagcaggcaccgccgcataaacaaaaatgtcatcgaacccggcatctcctgtcagcgcccgcagcatctggacaggatcgctcatccctttggtattcacatacaccagctcaatgcctttactggccgccagttccaccggcagcagcttctgtacctgcgccagacgtttgtcgtcgatatcgaccaccaccacccggctcggttgtatgccgccgttaatggcgtaatcgatagcgccaatgcccatcggacctgcacacgccagcagtgcaatattgccgccaggtttgacgcccatgcgatgctcataaacatattgcgtggtgtgataattggcatgataagcaccaataatgcagcacataggctctgccaggctcgccgcagcaaaataagagccgtgatacggtaatacgcagcccaaattaatggcgatttcgggaataatcatataagtggcattgccgccaaaatattcgtagctgtagcccgcactatatccgcttggtaaccccatcgccggttgcaatacaaaacgctggccttttttatatttgccagtgagatttttacccacttcgacaataaccccggcacattcatgcccggtaatgaccggatgattttctaaatcgtcgggtacgcgtttatgttcactaccgagtaacgccgctttccaggtgcttaaacagacgctgtcagaaattacactcaccagtaattcattatcggtaatttctggcagttcaaatacgcgcagacggacatcccgcttgccataaatagcagcaactttggttttcatttttacctctgtaatcagtgtttatgttcggcggttaattgattaaataaagtgtcgagttttggatcgccaatatagttattaatcaatatcagtggtttatccgtcacacgtttcacgcgcccttccagactggcatgagtaacgacgatatccgcatccgcaggcacgttttctatggcgtaatgttttacttcaattgccagccccgctttttccaggcgtttacggaaggtggtcgcgcccatcgcactggagcccatccccgcatcgcaaacaaaggcgatacgcttaaccctgcttaagctgaatgcaccctcttgtttcatcgccttaaccgcattggcactctgagcaaactcatcttcgctctccgtttccaccgttttttccatcttcagtatcaggctagtaatagcaaaggacaccagggtacctaccgtaacaccggcaattgtcgccaggaagctgcctttcggcgtcagtgccaggtaagcaaagatagaccccggacttgggccagccaccagaccaccgtccagtaagttaaacatccaggtgccagacataccgcccgcaatcatggcaataatggtcagcggcttcatcagcacatacgggaaatacagttcgtggatcccaccgaggaagtgaataatcatcgccccgggcgcagaacgtttactcatccctttaccaaacaaggtaaacgccagcagcagccccaggcccggacctgggttagaggccaccataaagaagatggatttaccgttaacgctagcctgttgcattcccagcggataatagacgccctgatcgatcgcattattgaggaaaagcactttcgccggttcattgatgacactcaacaatggcagataacccgcatgtaccagcgcctcaatacactctttgacgaaagtattggcaattaacaccgccgggccgataacttcaaaacccagcagacaaaggagcatccccgcgatacctaaactgaagttattgataaccatctcaaaaccggcaggtatgcgtttttccagtgccttatcgacatattttatgaccaacccaccgagcggccccatgatcatactgccaaggaacatcgggatctctgcgccaacgatcacaccaatagtacctattccgcccatgaccgccccgcgtttaccgccgaccagatgaccacctgtagaaccaatcatcacgggcaataaataggtaatcatcgggccgacaattttggcgaaatgttcgttaggcagccaaccggtgggaataaataacgcagtaataaaaccccaggcaataaaagcaccaatattggggatgaccattgcagtcaaaaagcccccaaaagcctggacctttgcacgagcagacttgttttccataatattatcctgtagaggagagagtaattatccgcggctgataatgtccgctaattgtttttcactacttgctgttaagagttgttcgagtatttcttcttcgcacagtaattcacttaacgcctgaatagcgccaatgtggctatcggcatcggcagcagagagtccgatgagtaatttaattggttcgtcattccccggaaaataaacaccttgttcaagtaatgtcaaagacatcccggttttaagcgccccacattccggtcgcgcatgaggcattgccacgcctggtgcgagaatataataagggccattgttaatggtggaatctttaattgcctgaatgtaattctcgctgatatagtttttatccagcaaacttaccatgctgaaatcgatagcttcctgccaatcttttgcactatgtataacactgatactactttctggaaaataatcactaagccgcataaattatccttattttatttttagggtaccgtccggcggtaaaaataaaatactcgtgcggtttaatgaaagcaattgagcagggaaaccggtgttttgaaaacagtgaattattaatttcttatataacattgagttatagatataacaacaaatgtcaatacgcatatcgtgatgcatattacataattgatatttattgcatataaatatttgtgatctacaacacgccttatctattgcttgtccgcaaacggacatatcaaggtaataaaaaaggtcgccgaagcgacctttttacccgaaatgctaattacagcagttcttttgctttcgcaacaacgttatcaacagtgaagccgaactcttcaaacagcagctctgccggagcagattcaccgaaggtggtcataccgacgatagcaccgttcaggccaacatacttgtaccagtagtcagcaatacccgcttctacagcaacgcgtgcagtaaccgctttcggcagtacggattcacggtaagcagcatcctgcttgtcaaatgcgtcggtagacggcatggacaccacgcgcgctttcacgccttcggcagtcagtttttcgtaggcagcaacagccagttcaacttcactaccggtagcgatgaaaatcagttccggctgaccggcgcagtctttcagcacataaccaccgcgcgcgatgtttgccagttgctcttcagttcgttcctgctgcgccaggttctgacgggagaggatcagtgcggtcgggccgtcctgacgctcaacaccgtatttccacgcgaccgcggattcaacctggtcacacggacgccatgtagacatgttcggggttacgcgcagagaagcgacctgctcaaccggctggtgagtcgggccgtcttcgcccagaccgatggagtcgtgggtgtaaaccatcacctgacgctgtttcatcagcgcagccatacgtacggcgttacgtgcgtattccacgaacatcaggaaggtggaggtgtacggcaggaagccaccgtgcagggagataccgttagcaatcgcggtcataccgaactcgcgaacaccgtagtggatgtagttacccgcagcatcttcgttgattgctttagaaccagaccacagggtcaggttagacggcgccaggtcagcagaaccgccgaggaattccggcaacagcggaccgaacgcttcgatagcattctgagacgctttacggctggcgattttcgccggattagcctgcagtttagcgatgaactctttcgctttagcgtcgaagtcagacggcatttcgcctttcatacggcgggtaaattcagcggcttcctgcggataagctttcgcgtaagcagcgaatttctcgttccatgcggattctttcgcctggcctgcttctttcgcatcccactgagcatagatttcagacgggatttcgaacggcgcatatttccagcccagttgttcgcgggtcagggcaatttcagcgtcgcccagcggcgcaccgtgggagtcgtgggtaccggctttgttcggggaaccgaaaccgatgatggttttgcacatcagcagggaaggtttgtcagtcactgcgcgcgcttcttctactgcgcgtttgatagatgccgcgtcatgaccgtcgatgtcgcgaataacgtgccagccgtaagcttcgaaacgcattgcggtgtcgtcggtgaaccagccttcaacgtgaccatcgatagaaataccgttgtcatcgtagaatgcaatcagtttacccagcttcagcgtacccgccagagagcaaacttcgtgggagatgccttccatcatgcagccgtcgcccatgaaggcgtaggtgtagtggtcgacaatgtcgtggcccggacggttaaactgcgccgccagcgttttttctgcaatcgccataccgactgcgttggcaataccctgacccagcggaccggtggtggtttccacaccagcggtgtaacccacttccgggtgacccggagttttagagtgcagctgacggaagtttttcagttcttccatcggcagatcgtaaccggtgaggtgcagcaggctgtagatcagcatggagccgtggccgttggacagcacgaagcggtcacggtcagcccaggacggattctgcgggttgtgtttcaggaaatcacgccacaggacttcggcaatgtcagccatacccataggggcacccgggtgaccggatttggctttctgtactgcgtccatgctcagcgcacgaatagcattggcaagctctttacgactggacattttgactccagatcggatgatgaagggcacgcccttaacgacttgacgacagcgcgttttgggctacgccggaaaatttgccaacaatttaccgcaagccgcgcgtcatgtacatggaacatccttttgccgcttcagaaatctctggatcatgctcgcatgttgcgcaatctactcgcccgtccgctgcgcttttccttatactgagactgagcgtcgattcacctgcaaacggcgcatttttagaataatcctgaccttgtgcggaagagaaaacatgaaaattcgcgccttattggtagcaatgagcgtggcaacggtactgactggttgccagaatatggactccaacggactgctcagtagtggagcggaagcttttcaggcttacagtttgagtgatgcgcaggtgaaaaccctgagcgatcaggcatgtcaggagatggacagcaaggcgacgattgcgccagccaatagcgaatacgctaaacgtctgacaactattgccaatgcgctaggcaacaatatcaacggtcagccggtaaattacaaagtgtatatggcgaaggatgtgaacgcctttgcaatggctaacggctgtatccgcgtctatagcgggctgatggatatgatgacggataacgaagtcgaagcggtgatcggtcacgaaatggggcacgtggcgttaggccatgtgaaaaaaggaatgcaggtggcacttggtacaaatgccgtgcgagtagctgcggcctctgcgggcgggattgtcggaagtttatctcaaagtcaacttggtaatctgggcgagaaattagtcaatagccaattctcccagcgccaggaagcagaagccgatgattattcttacgatcttctgcgccaacgcggcatcagcccggcaggtcttgccaccagctttgaaaaactggcaaaactggaagaaggtcgccaaagcagtatgtttgacgaccatcctgcatccgccgaacgcgcccagcatattcgcgatcgcatgagcgcggatgggattaagtaaagcctggtggtgtcgaacgtaggtcagataaggcgttcacgccgcatctgacatgaatggcacatttgttaccttgtgcgcattgccggatgcgatgctggcgcatcttatccggcctacgggtgccgaacgtaggtcggataaggcgttcacgccgcatccgacattaatggcacgttttacccgtgcgcatcgcatctggtgcttactcgccctttttcgccgcctgaatatacagcatttccagcgccagcgttgccgctgccagagcagtgatttcgctctgatcgtatgccggagccacttccactacgtccatcccaacaatgttgagatctttcaggccgcgtaccagtttaatagcgcgatcggaggtcaggccgccaatcactggcgtaccggtgcctggtgcaaaagcaggatccaggcagtcgatatcaaaagtcaggtaaaccggcatatcacccacaatctgtttcacttgggcgataacgtcatccacgctgcgatcgttcacctggcaggcgtccagcacggtaaagccgttgtctttatcaaactcggtacgaataccaatctgcacggaatgattcgggtcgatcagaccttctttcggcgcggtatagaacatagtgccgtggtcaaattcacaaccgttcgcataggtatcggtgtgggcgtcaaagtgtaccagcgccattttgccgaaatgcttcgcatgagcacgcagcagcggcagcgtaacaaagtggtcaccaccgaaagagagcatacgcttaccggcagccagcagcttctcggcgtgcgcctgcagcttttcgctcatctcacgggcatcgccaaaggcatataccagatcgccgcagtccacgacgttcagacgctcacgcatgtcgaaattccacgggaagcggttgtgttcccaggccagattcgtgctaacctgacggatcgctgccggaccgtggcgaccacccgcacgaccagaagtggccatatcgaacggcacgccagtaatcacccagtctgcatcgctgtcatacggctggaagttcatcggcaggcgtaaaaaaccaaaggcattggaaaccagactgttatcgtattgatgacctaaggtgctcatggatggactcctattacaaagtcgatataaaaaaacccttccgcgtcgttaggcccgacgaggaagggttggatttgtcacaataaattgtggcggattatcaccgctaaattaagcggattcaagtaacacaggacttactcatcttcaagataagtataaccgtacaaacctgcctcgaactcttcaaggaactgttgttgcagttcagcatcaagatcggttttcttcacttgatcgcggaactgggttaacagcgttttcggatcgagctgtacatattgcagcatgtccgccacggtatcgccttcgtcagacagttctacttctacgctaccgtcagggaagacgaacacgtcaaccgcttcggtatcaccgaacaggttgtgcatgttgccgaggatctcctgatatgcgccgaccataaagaaaccgagcatcggcggattctctggatcgtactccggcattggcattgtcgtggcaataccgtcaccatcaatatagtggtcgatagcaccgtcagagtcacaggtaatatccagcagcacagcgcgacgttccggcacttgatccagcccttccagcggcagaaccgggaacaactggtcgatcccccatgcgtccggcatgctctggaacaggctgaagttgacgtacattttgtccgccatacgttcctgcagctcgtcgataatcggacgatgagcacggttttgcggatccagctgcttttgcacttcatggcacatgctcaaataaagctgctcagcccatgcacgttcttgcaggctaaagatgccggaagagtagccgatatgaatgtcgtgcagatccatctgactgtcgtgtaaccattcacgcagagaacggcgagttcccggttcgtgcatctcctgccaggtttcccacatgctttgcagcgcgcgcggcgcatcttctgcaggcgcggtcggcaccgtgtattcgttacgttccacgccgatgatattagacaccagcacggtgtgatgcgcagtcaccgcacgaccgctttcggtgattaccgtcggatgcggcagaccgttttcttcacacgcatcgccaatcgcccagataatgttgttggcgtattcattgaggccgtagttcacgctacagtcggactggctacgagtaccttcataatccacgcccagaccgccgccgacgtcgaagcactgaatattgacgcccagcttgtgcagttccacatagaaacgcgcggattcacgaacgcctgtcgcgatatcgcgaatattcgccatctggctaccgaggtggaagtgcagtagttgcaggctgtcgagacgcccggcttcacgcagggtttcaaccagttgcagtacctgagtcgcagccaggccgaacttgcttttttccccgccggaggactgccatttaccgctaccctggctagccagacgtgcacgcacgcccagacgaggaacgacattcagacgttctgcttcatccagcacaatggcgatttcactcatcttctcaatgaccagatagaccttgtgccccatcttctcgccaattaatgccaggcggatatattcgcggtctttataaccgttgcagacgatgacgctacgggtcatgccagcatgtgccagtactgccatcaactcggctttggaaccggcttccagacccagcggttcgccgctatgaatcagggactcaatcacgcggcggtgctggttaactttgatcggataaacaaggaagtaatcgccgttatagccgtaggattccctcgcacgtttgaacgcggcgttaatggaacgcaaacggtgctgcaggatctgtgggaaacagaacagtgcaggcagacgctggccctgtgcttcacgagttttcactaactgcgcgagatcgacgcgagcttccgggacgtccgggtccgggcacacgctaatgtggcccagctcgttaacgtcatagtagttattgccccaccaggcaatattgtaagtacgcagcatcttgctggcttcctgggagctcattgcaacctcctgcatggagcgtagtacaccgtgttcgcccgcactgctaggcaaacccatagacatgtcgtcagacatagcgaacctcaaattattttattaagtgtaaaacagttaacgactatcgcagcctggaactggcttaacaacccataagcacatggattttccagcagactatgctgacgctccaactgcgcaaccggtttctttttcataacattattaagcacataaccgaacgtaagtgtgaaagttcggcgaaaccacgagaaaactcttgtttttacaagagcgcccttgttcagtcctcagtaactgtaaccagctcttgaatcctgagaagcgccgagatgggtataacaagcgcaggtatgcaaagcagagatgcagagtgcggggaacgaatcttcaccagaacggtgagacaggttaagcagcagacaacggttcattatttcgtaagtcctccacggccgcctgttaagacgaacccacaagccaaaactctgattagtacccggctggaagtggcaacacgaaagaaacgtcgtgtgctttttatttaagccgcgcgccgcgttttataccccacaatggcagaaaattgcaaaagataaatacgcagaatgccggcattgtcaggaaaaatttccagccacgtttttaacagaatgagacagctttcaaaaaaaagtggaaatagggtgaagaattgacctaaaatagccatccagatgttaatccatccataccgattaacactcagactgccagtgtttttaacctgcagagtcgtggtaggatccgctaccacagaaaatccacacaacagtttgagctaaccaaattctctttaggtgatattaaatatggcaaaacacctttttacgtccgagtccgtctctgaagggcatcctgacaaaattgctgaccaaatttctgatgccgttttagacgcgatcctcgaacaggatccgaaagcacgcgttgcttgcgaaacctacgtaaaaaccggcatggttttagttggcggcgaaatcaccaccagcgcctgggtagacatcgaagagatcacccgtaacaccgttcgcgaaattggctatgtgcattccgacatgggctttgacgctaactcctgtgcggttctgagcgctatcggcaaacagtctcctgacatcaaccagggcgttgaccgtgccgatccgctggaacagggcgcgggtgaccagggtctgatgtttggctacgcaactaatgaaaccgacgtgctgatgccagcacctatcacctatgcacaccgtctggtacagcgtcaggctgaagtgcgtaaaaacggcactctgccgtggctgcgcccggacgcgaaaagccaggtgacttttcagtatgacgacggcaaaatcgttggtatcgatgctgtcgtgctttccactcagcactctgaagagatcgaccagaaaagcctgcaagaagcggtaatggaagagatcatcaagccaattctgcccgctgaatggctgacttctgccaccaaattcttcatcaacccgaccggtcgtttcgttatcggtggcccaatgggtgactgcggtctgactggtcgtaaaattatcgttgatacctacggcggcatggcgcgtcacggtggcggtgcattctctggtaaagatccaagtaaagtggaccgttccgcagcctacgcagcacgttatgtcgcgaaaaacatcgttgctgctggcctggccgatcgttgtgaaattcaggtttcctacgcaatcggcgtggctgaaccgacctccatcatggtagaaactttcggtactgagaaagtgccttctgaacaactgaccctgctggtacgtgagttcttcgacctgcgcccatacggtctgattcagatgctggatctgctgcacccgatctacaaagaaaccgcagcatacggtcactttggtcgtgaacatttcccgtgggaaaaaaccgacaaagcgcagctgctgcgcgatgctgccggtctgaagtaatctttcttcacctgcgttcaaaggccagcctcgcgctggcctttttcttttggataggcgttcacgccgcatccggcaaaaaaaccgcccgcacaataacatcattcttcctgatcacgtttcaccgcagattatcatcacaactgaaaccgattacaccaaccacaacagacaaagatttgtaatattttcatattattattcggttttcacagttgttacatttcttttcagtaaagtcttaattgcagataacagcgtttaatctatgatgatataactcaattattttcatgcacttaaatcataactaagataaatgttagtgtaagcgattacactgatgtgatttgcttcacatctttttacgtcgtactcacctatcttaattcacaataaaaaataaccatattggagggcatcatgcctgacgctaaaaaacaggggcggagtaacaaggcaatgacgtttttcgtctgcttccttgccgctctggcgggattactctttggcctggatatcggtgtaattgctggcgcactgccgtttattgcagatgaattccagattactagccacacgcaagaatgggtcgtaagctccatgatgttcggtgcggcagtcggtgcggtgggcagcggctggctctcctttaaactcgggcgcaaaaagagcctgatgatcggcgcaattttgtttgttgccggtagcctgttctctgcggctgcgccaaacgttgaagtactgattctttcccgcgttctactggggctggcggtgggtgtggcctcttataccgcaccgctgtacctctctgaaattgcgccggaaaaaattcgtggcagtatgatcagcatgtatcagttgatgatcactatcgggatcctcggtgcttatctttctgataccgccttcagctacaccggtgcatggcgctggatgctgggtgtgattatcatcccggcaattttgctgctgattggtgtcttcttcctgccagacagcccacgttggtttgccgccaaacgccgttttgttgatgccgaacgcgtgctgctacgcctgcgtgacaccagcgcggaagcgaaacgcgaactggatgaaatccgtgaaagtttgcaggttaaacagagtggctgggcgctgtttaaagagaacagcaacttccgccgcgcggtgttccttggcgtactgttgcaggtaatgcagcaattcaccgggatgaacgtcatcatgtattacgcgccgaaaatcttcgaactggcgggttataccaacactaccgagcaaatgtgggggaccgtgattgtcggcctgaccaacgtacttgccacctttatcgcaatcggccttgttgaccgctggggacgtaaaccaacgctaacgctgggcttcctggtgatggctgctggcatgggcgtactcggtacaatgatgcatatcggtattcactctccgagcgcgcagtatttcgccatcgccatgctgctgatgtttattgtcggttttgccatgagtgccggtccgctgatttgggtactgtgctccgaaattcagccgctgaaaggccgcgattttggcatcacctgctccactgccaccaactggattgccaacatgatcgttggcgcaacgttcctgaccatgctcaacacgctgggtaacgccaacaccttctgggtgtatgcggctctgaacgtactgtttatcctgctgacattgtggctggtaccggaaaccaaacacgttagcctggaacatattgaacgtaatctgatgaaaggtcgtaaactgcgcgaaataggcgctcacgattaatctccccaagcttcctcccatcgcggaggaagccacctcttgcagtcatcttttcttcgctctatcctctgccgctatgaaaacatcccgtctccctatcgccatccaacaggccgttatgcgtcgcctgcgggaaaaactcgcccaggccaacctgaagctagggcgtaactacccggagccaaaactctcttacacccagcgcggaacctccgccggaacggcctggctggaaagctatgaaattcgcctcaatcccgttttgctgttggaaaacagtgaagcttttattgaagaagtggtaccgcacgaactggcacatttgctggtatggaaacatttcggccgcgtagcgccacatggcaaagagtggaagtggatgatggaaaacgtgctgggtgttcccgcccgtcgtacgcatcagttcgaactgcaatccgtgcgtcgcaacaccttcccctaccgctgcaagtgccaggagcatcagcttaccgtacgccgccataatcgcgtagttcgtggcgaggccgtctatcgctgtgttcactgcggtgaacagctggttgcgaaataaccatctgaactatcaggaactttcctgatttggctgattgcataccaaaacagctttcgctacgttgctggctcgttttaacacggagaagtgcctacactagcgggattctttttgttaacccctaccccacgcgtacaaccgcgtggggagacgacgcggatttttaactatgcgtatcccccgcatttatcatcctgaaccactgaccagccattctcacatcgcgctttgcgaagatgccgccaaccatatcgggcgcgtactgcgcatggggccggggcaggcgttgcaattgtttgacggtagcaaccaggtctttgacgccgaaattaccagcgccggcaaaaaaagcgtggaagtgaaggtgctggaaggccagatcgacgatcgcgaatctccgctgcatattcacctcggtcaggtgatgagccgtggtgaaaaaatggaatttactatccagaaaagcatcgaactcggtgtaagcctcattacgccacttttttctgagcgctgcggcgttaaactggatagtgaacgtctgaacaagaagcttcagcagtggcagaagattgcaattgctgcctgtgagcagtgtggtcgtaaccgggtgccggaaatccgtccagcgatggatctggaagcctggtgtgcagagcaggatgaaggactgaaactgaatcttcacccgcgcgccagtaacagcatcaatacgttgccgttaccggttgaacgcgtccgcctgctgattggcccggaaggcggtttaagcgcagatgaaattgccatgactgcccgctatcaatttactgatatcctgttgggacctcgcgttttgcgtacagagacaactgcgctcaccgccattaccgcgctacaagtacgatttggcgatttgggctaacggagaagaataatgatcaagctcggcatcgtgatggaccccatcgcaaacatcaacatcaagaaagattccagttttgctatgttgctggaagcacagcgtcgtggttacgaacttcactatatggagatgggcgatctgtatctgatcaatggtgaagcccgcgcccatacccgcacgctgaacgtgaagcagaactacgaagagtggtttagcttcgtcggtgaacaggatctgccgctggccgatctcgatgtgatcctgatgcgtaaagacccgccgtttgataccgagtttatctacgcgacctatattctggaacgtgccgaagagaaagggacgctgatcgttaacaagccgcagagcctgcgcgactgtaacgagaaactgtttaccgcctggttctctgacttaacgccagaaacgctggttacgcgcaataaagcgcagctaaaagcgttctgggagaaacacagcgacatcattcttaagccgctggacggtatgggcggcgcgagcattttccgcgtgaaagaaggcgatccaaacctcggcgtgattgccgaaaccctgactgagcatggcactcgctactgcatggcgcaaaattacctgccagccattaaagatggcgacaaacgcgtgctggtggtggatggcgagccggtaccgtactgcctggcgcgtattccgcaggggggcgaaacccgtggcaatctggctgccggtggtcgcggtgaacctcgtccgctgacggaaagtgactggaaaatcgcccgtcagatcgggccgacgctgaaagaaaaagggctgatttttgttggtctggatatcatcggcgaccgtctgactgaaattaacgtcaccagcccaacctgtattcgtgagattgaagcagagtttccggtgagcatcaccggaatgttaatggatgccatcgaagcacgtttacagcagcagtaacccaccttagcgagaaggatctcgttgagactctgagtgacagcgcccttctttccacgcatactgggcgctgttgcttttttgaaccaggaaacagaacctctgacaatgaatttacagcatcactttcttattgccatgcctgctctccaggatccgattttccgtcgttccgtggtctacatttgcgaacataataccaatggtgcaatggggatcatcgtcaacaagccgctggaaaatctcaaaattgaagggattctggaaaagctgaagatcacgccggagccgcgtgatgaaagtatccgtctggataaaccggttatgctcggcggtccgctggctgaagatcgcgggtttattttgcatactccgccctccaattttgcttccagcattcgcattagtgacaacacggtaatgaccacttcccgcgatgtgctggaaacgctcggcaccgataaacaaccgtctgacgtattggtggctctgggttatgcctcctgggagaaaggtcaactggaacaagaaattctcgataacgcgtggctaacggccccggcagatctgaatattctgttcaaaacgccgattgccgaccgctggcgcgaggcggcaaaactgattggtgtggatattctcaccatgcctggtgtggcaggacacgcctgatgagtggaaccttactcgccttcgacttcggcaccaaaagcattggcgtagcggtcggccaacgcattaccggcaccgctcgccctttgcctgcaattaaagcacaggacggtacgccggactggaacattatcgagcgtttactgaaagagtggcagccggacgaaatcatcgtcggtttgccgctgaatatggacggcaccgagcaaccattgactgccagagcgcgtaaatttgccaaccgtattcatggccgtttcggtgttgaagtaaagctccatgacgagcgtcttagcactgtggaagcccgttccggtctgtttgaacagggcggctatcgggcgctcaacaaaggcaaagttgactctgcctctgcggttattattctcgaaagctatttcgagcagggatattaaggcgatttaaacgcctggcggagtgtaaataatatcatcgcgtcttattgccggatgcggcgtgaacaccttatccagcacacatctggcagcggctataggtctgataagacgcgttagcgtcgcatcagacatttattgcctttgtaggcccgataagcttgcgcatcgggcatggcaacgtcacaaacgcccttcccccacccggtgctgataactctgctgaaacgttatcatccccacctgctgcccggtttgaataacatgcggtaactggtgggttttcccttcgcgaatcaaattccccaccgcgggtgtgttaatcagcaattcaaatagcgccacgcgtccttcctgtttatccacttccagcttttgactcagcactgcccgtaaactacctgccagttgattacgcacggggtctttttcctgcgccggaaaactatccaccagtcgctcaactgcctgcgcggcaccacgcgtatgtaatgttgccagcaccaaatgcccggtttctgccgccgtcagtgccagacggattgtctcgctgtcacgcagctctccgagcaaaatcacatcaggatcttcccgcaatgcggcccgcaatccgcttgcgaacgtcatacagtgcaaaccaatttcccgctgctggatcaaacatcgctggctggcatagagatattcaacaggatcttccagcgtcagaatatgcgcatcggcatgttgattgagatagccaaccatcgccgccagcgtggtagatttgccactccccgtcgcccccgtcaccagaatcaggccattctcgctcttgagtaattccggcaataccgttggtgcgccaagctgttcgagctgcgggcagtggctaggtaacagccgtaacgccaggctaatgccatgccgttgcgcgaatgcgctgccacgcaatcgctggttttccgccaggctcacggcaaaatccagctgaccattctccagcaatattgcccgctgatcgtcatccagccactcccgcagtagctcttcgacgtccggcgtatcaaacggcgcagcttccattctgccgcgaatgcgccatcgtgcgggccaggcgctgcacaggtgtagatcgctgacgttatgctttacactaagggccacaatttcttccatattcatactaagatcctcggaaaatgaacgatattgcgcataacctggcacaggtccgggacaaaatcagtgcggctgcaacgcgttgcggccgttctccagaagaaattacgctgcttgcagtcagtaaaacaaaacctgcgagcgccatcgcagaagccattgatgccgggcagcgtcaatttggtgaaaactacgttcaggaaggggtagataaaattcgccactttcaggaactgggcgtaacaggattagaatggcattttattggcccgttgcagtctaataaaagccgcctggtggcagagcatttcgactggtgtcataccatcgaccgtttgcgcatcgctacccgtctcaacgaccagcgcccggcagaacttccccctcttaacgttctgattcaaattaacattagtgatgaaaacagtaagtccgggattcaactggctgaactggacgagctggcagctgcggtcgctgaactaccgcgtttacgtctgcgcgggttgatggcaatccctgcgcctgagagtgaatatgtaaggcagtttgaagttgcacgccaaatggctgtagcatttgccggactgaaaacgcgctacccgcatatcgacacgctctctctgggaatgagcgacgatatggaagccgccattgcggcaggtagcacgatggttcgtatcggcactgcaatttttggtgcgcgtgattactctaaaaaataaggaattaaaggaacgccatgaatacgttgactttcctgcttagtacggtcattgagctgtataccatggtgctgttattacgcatctggatgcagtgggctcattgtgatttttacaaccccttcagtcagtttgtagtgaaggtaacgcagccaattatcgggccactgcgccgcgttattccggcaatggggccaattgacagcgccagcctgctggttgcctatattctcagttttatcaaagccatcgtgctgtttaaagtggtgaccttcctgccaatcatctggattgccggtttactgattctgctgaaaaccatcggcctgctgattttctgggtcctgctggtgatggcgattatgagctgggtaagccaggggcgtagcccgattgaatacgtgctgattcagctggccgatccgctgctgcgcccgattcgccgcctgctaccggcaatgggtgggattgatttcagcccgatgatcctcgttctgctgctgtatgtcatcaatatgggtgtcgcagaagtattacaggcaaccggaaatatgctgctgccagggctgtggatggcgttatgaatgccgtaacagttaatgatgacggtctggttttacggctctatattcagccgaaagccagccgtgattctattgtcggtttacatggcgacgaagttaaagtcgccattaccgcgccgccggttgacggccaggccaacagtcatctggtgaagtttctcggtaagcaattccgggttgccaaaagccaggtggtgattgaaaaaggcgaacttggccgccacaaacaaattaaaatcattaatccgcaacaaatcccgccagaaatcgcggcgttaattaattaagtatcctatgcaaaaagttgtcctcgcaaccggcaatgtcggtaaagtgcgtgagctggcgagcctgcttagcgacttcggtcttgatatcgtggcccaaacagacctcggcgttgattccgctgaagaaaccggcctgacctttatcgaaaacgcgattctgaaagcgcgccatgcggcaaaagtgaccgctttaccggcaattgccgacgactctggtctggcggtagatgtgcttggcggcgcgccgggcatttactccgcgcgttattccggtgaagacgcgaccgatcaaaagaatctgcaaaaactgctggaaacaatgaaagacgtaccggacgaccaacgtcaggcgcgtttccactgcgtgctggtatatctgcgtcacgcggaagatcccactccgctggtatgccacggtagctggccgggcgtgattactcgtgaaccagcgggcactggtggctttggttatgatccaatcttcttcgtaccttccgaagggaaaaccgccgccgaactgacccgcgaagaaaagagcgccatttcccaccgtggtcaggcgttgaaactgctgctggacgctttacgtaatggttaaattacctccgctgagtctctacattcacatcccgtggtgcgtgcagaaatgcccgtactgcgatttcaactctcacgcgttgaaaggagaagtgccgcacgacgattatgttcagcatctgcttaacgatctggacaacgatgtggcttacgctcagggccgtgaagtaaagacaatctttattggcggtggtacgccgagcctgctttccggcccggcgatgcaaacgctgctggacggcgtgcgtgcgcgtttgccgctggcagcggatgcagaaattactatggaagcgaaccctggcacggtagaagccgatcgctttgtcgattatcagcgtgctggtgtgaaccgcatctctattggtgtgcagagttttagcgaagaaaagctgaaacgacttgggcgtattcatggcccgcaagaagcgaaacgcgcggcgaagctggcgagcggtttagggttacgtagctttaaccttgatttgatgcatgggctgccggatcaaagtctggaagaggcgcttggcgatctacgccaggccattgaactgaatccgccgcatctttcctggtatcaactgaccatcgaacccaatacgctgtttggtagccgaccaccggtgctgccggacgatgacgcgttgtgggatatattcgaacaggggcatcagttattaaccgcagcgggttatcagcaatatgaaacttccgcttacgccaaacccggttatcagtgccagcacaatctcaactactggcgctttggtgactacatcggtattggctgcggcgcacacggcaaagtgaccttcccggatgggcgcattctgcgtaccaccaaaacgcgtcatccgcgtggttttatgcaaggaaggtatctggaaagccagcgtgatgtcgaagccacagataagccgtttgagttctttatgaatcgcttccgtctgctggaggccgcgccgcgcgtggagtttattgcgtataccgggctttgcgaagatgtgattcgcccacagttagacgaggcgattgcccagggttatctcaccgaatgtgcggattactggcagataacggaacatgggaagctgtttttaaatagcctgctggagctttttctggctgagtaaacttgtattgccggatgcggcgtgaacgccttatccagccgacatgtggcagcggttgtaggtctgataagacgcgcaagcgtcgcatcagacgttgattgccggatgcggggtcaacgccgcatcctgctacaaatcgtgcactatatcaaacttacttaatcaccccattgcgccgcagttgttcggtatcttttttccagcgttcattagcttggttgatatcgtcaattttcatcaaaatcgcgacttttttactgtttatttcactaactttcatcgttaacggatattgccctttttcgagcgttacccagtcatcctgcaatttacggctaagtttttgactttgcagaaaagtctgtcgccgttgttcgttgatatcgaaatctcgtttctgctgaatcggcacttcataacactcttcactctgtttatgacatgccgcaatcgccggttgataaacctctttgtcatatttaaccgcgaacgcctcgctatcgttctgtttattaaactcatcacgctgttggtgaatttttttaaaggcgtcttcgcgggtcatttgcttaccgtttgcatcttttccccaatatgcatccgctgctttctgcgccgccaccatttgcttatcaagcgctttcacttccttttccagcgcaggaatgctgttcttctgggtattcaacgcagattcaagctgactaaagcgataattgaaatcttcgctattcacgatcagatatttattattcgttttgatatcgtcgaccacccgcccacgatcgctggctgccgcctgaaaagagtaaaagttcacgctccagccagacgcgggcgttcctttactggttaacatcgcgctgaattttaccggtttatctttcgtccaggtctgttcgagcagttcgtaatctgccaactgaccgacccaggtatagagatcgtcactggaagagacatcgccttccgcactccaggtggcctgattacccttagcatcaagattttttaaggtgatagcatcaagcttgagaatgccgtgatactgctttttgaattgatcttttaagatattttcagttggcggttcgccatctgcccaggcattaccagtcatcaacataagcagtgccgtgccaacaatccattgctttttcacccgaaaaacctcacgcggaataatttattccggtgattatcattagggtaattaaaattggcaatggacgtgagtctgaagtgaaaaagccccggcacgataccggggcgaggcgattagtactgattgaagatctgctggatctgctgcggatctttggtttgcgtcagagccagttgcagcagaacgcgcgctttttgcgggttcagcgtgccagaggcgacgaagccgtatttcgcatcatccacttcggcatcctgagtggtagcgcccgtcggtacgcgggaagaacgcacgactgcagtaccggttttcgcggcggtcgccagcgtgtcgaacacagatttatacaggttgccgttacccacaccagcgctaacgatgccatcatagcccgcatctaccagtgctttagccggaagatcggatgcgttagcgtagttataaacaatgccgactttcggcagttcattcagcttagagacatcgaatggcgtgtcgctggtatgcttacgtgccggggtacgctggtagtcaatcttaccgttgtgaatgtaacccagaggaccgtagttaacagacttgaaggtcgctacgtcggtggtgttggttttggtgacgtcacggccatcaagcacggtgtcattcatcactaccagcacgccacggttggcggaggctttatcagctgcggtcactaccgcgttatacaggttgaatggaccgtctgcgctcatagacgtggacggacgcattgcgccgaccatcaccaccggtttgtcgcatttcaccgtcaggtcgaggaagtaagcagtttcttccatcgtgtcggtaccgtgggtaatgacgaagccgtcggtcttatcgcagtcggtgttaatttttttcgccagtgtcagccagacattatcgttcatgtcctgggagccgatattcactacctgctcgcctttaacgttcgcaatgtcttttagttgcggcaccgcattaaccagattttctacgccaactttacccactgtgtagttagatttggttgcggagtcaccaccaccggcaatggtcccgccggttgctaaaatggtgatattgggtaatgccaatgctgcaccactaaaacccataaccagtgcggcaagtgccgtctttttgaaaaactccatttcattcctccagttacgtgaacgctacgcattatcccttagctctgtatgggaaatttgacgttaaacaatttacaacgtgaatatattttggagatctacaaagttagaggcaggtaacaaaacgaagaattaaacggcataaaaaagtattatgccgtcttaaaatagaggattattttaaattcccgaccagggctttgcggctatcttccagagtcacaacgcggctacaaacatctttgccaaactgctggaaatctttttcctgctttttccactcggtttggatactggattgcagcccccccaggcttcccagcacattctgtaatgggttaccgccgcttttcagcaccgctttcgcgcccatttcattaatgctgtcctgtaaaattccacccattgcctgattcactaattgctggccttcggcgcgaacctgatcaatggctttatagtgaaacgtcaggccatcgctgcgcgtttcaataatgcggttcatctgctctttcagctgcgcatcaagtttggtcagacggctgcgcattttgctgctttcgcccatctcctgaacgataattttatccagagcaatacgggctttctcgacgcggcttttcgcgccttcatcaatccacggcagcgtgctgcgtagttcagcctgataatccttcgcctgctcgcgctgggcggcattcagggaatattgcttaccgttatacatcacgttgccgtctggcgtgatcaccagattgccgttttcgcccttcacctgcacggtttgcgggctgacaatcacatcgtcacgcggcgtgacgctgcactggtagtcggcgtgagcggtcattgccgtcacactaagtgctgccgccagcagcattttgcgcatcatagtcttccctcaagaaaaaatcaggccagcatttgctggccccagattgataacaaagtacgcgttttccatgccggatgcggcgtaaacaccttatcccgcctactcgatcgtgcatctttccaggcctgataagcgtagcgcatcaggcagttttgcatttgtcatcgcccgtatgctttcttagtcccaccaaacgtcgaaaagttcgctggtgcgtacctcatccagtttgcgctcttccagccacttacgcacaatcgcctgatgttcttcggtgcatttgccgatttcctgcatgcagatcagaccttcccaggccagataaccgctgccgtcaaaggccagtttgttcggttcgataacctcgttaataaaatcatcaacggttttatcaatctgttcttcgcttgtaccttccgggaatcgccatgccacgctaaatcctaattcctggaattcgtcgatgtgcatttttttacgcagacgacggctacggttctttgccattatttcaccctctcgaacattaagtcccatactccgtgaccaagacgatgaccacgttgttcaaatttcgtcaccggacgacttgccggacgcggtacgtaatcattgctctcactcaggtttttataaccgtcaatagaagacatcacttcaagcatatgttccgcataaggttcccagtcggtcgccatatggaatacgccccccagctgcagtttgctttttaccagttcggcaaacggcacctgaacgatacggcgtttattatggcgcgctttgtgccacgggtcagggaaaaagagctgcaccatgcgcaaactattgtcaggaatcattttatgcagcacttcaaccgcatcgtgacacatcacgcgcaggttgcttaaaccttcttcatgcgcagaagccaggcacgcaccaacgcccggactatgcacttcaatgccgaggaagtcctgctcagggcgatctttagccattgccaccaggctcgcccccatgccaaaaccaatctcaagcgtcaccggcgcttcacggccaaaaagcgcggggaaatccagcatatcttcgctgaactcaacgcccatcaccggccagtagttttccagcgcatgttcctggcctttggtcagtcgcccctggcggcgcacaaaactacggatacggcgcagtgggcggccgttttcatcaaattccggactaatgacgtcgtttttcataaaggtttagtcgcttgtgaaagtgttctgaaaacgggcattatccaaagttagttgccggatgcaagcatgataaggccgtggctgcggaaagttccggtttacaccctgccgtcgctgtgctgcaatcttgcccccaacaacagtgaattcggtgaccatgcaagcgagccaatttagtgcccaggttctggactggtacgataaatacgggcgaaaaactctgccctggcaaattgacaagacgccctacaaagtatggctcagtgaagtgatgttgcaacaaactcaggttgcgaccgttatcccctattttgaacgctttatggcgcgcttcccgacggtgaccgatctcgccaatgcgccgctcgacgaagttctccacttgtggaccgggcttggctattacgcccgcgcgcgcaatctgcataaagcggcacaacaagtggcgaccttacacggcggtaaattcccggaaacctttgaggaagttgcagcactgccgggcgtcgggcgttccaccgcaggcgcgattctcagcctttctctgggtaagcactttccgattctcgacggtaacgtcaaacgcgtgctggcgcgctgctatgctgtaagcggctggcctgggaaaaaagaggtcgagaataaattatggagtttgagcgagcaggtgacgcccgcggttggcgtggaacggtttaatcaggcgatgatggatttgggtgcgatgatttgtacgcgcagcaaaccgaaatgtagcctctgtccgctacaaaacggatgtattgccgccgccaacaatagctgggcgctttatccgggcaaaaaaccgaaacagacgctgccggagcgcaccggctactttttgctattacagcacgaagatgaagtattgctggcgcagcgtccgccgagcggattgtggggcggtttatactgtttcccgcagtttgccgacgaagaaagtttgcggcagtggctggcgcaacggcagattgctgccgataacctgacgcaactgaccgcgtttcggcataccttcagccatttccacttagatattgtgcctatgtggcttcccgtgagcagtttcaccggctgcatggatgaaggcaatgcgctctggtataacttagcgcaaccgccgagtgttggcctagcggctcccgtggagcgtttgttacagcagttacgcactggcgcgccggtttaacgcgtgagtcgataaagaggatgatttatgagcagaacgattttttgtactttcctgcaacgtgaagcagaaggtcaggattttcagctgtaccccggcgagctgggaaaacgcatctataacgagatctccaaagaagcctgggcgcagtggcagcacaagcaaaccatgctgattaatgaaaagaaactcaacatgatgaatgccgagcaccgcaagctgcttgagcaggagatggtcaacttcctgttcgagggtaaagaggtgcatatcgagggctatacgccggaagataaaaaataaaaacagtgccggagcacgcctccggcaacttgcataaaaacaaacacaacacgcacccggaatgatgaaaaaatatctcgcgctggctttgattgcgccgttgctcatctcctgtagcacgaccaaaaaaggcgatacctataacgaagcctgggtcaaagataccaacggttttgatattctgatggggcaatttgcccacaatattgagaacatctggggcttcaaagaggtggtgatcgctggtcctaaggactacgtgaaatacaccgatcaatatcagacccgcagccacatcaacttcgatgacggtacgattactatcgaaaccatcgccgggacagaacctgccgcgcatttgcgccgggcaattatcaaaacgttattgatgggtgacgatccgagtagcgtcgatctctattccgacgttgatgatattacgattagcaaagaacctttcctttacggtcaggtggtggacaacaccgggcagccgattcgctgggaaggtcgcgcaagcaacttcgcggattatctgctgaaaaaccgtctgaagagccgcagcaacgggctgcgtatcatctacagcgtcaccattaacatggtgccgaaccaccttgataaacgtgcgcacaaatatctcggcatggtccgccaggcgagtcggaaatatggcgttgatgagagcctgattctggcaattatgcagaccgaatcttcctttaacccgtatgcggtcagccgttccgatgcgctgggattaatgcaggtggtacaacatactgccgggaaagatgtgttccgcagccaggggaaatccggcacgccgagccgcagtttcttgtttgatcctgccagcaatattgataccggcaccgcgtatctggcgatgctgaacaatgtttatctcggcggaattgataacccaacaagccggcgttatgccgtcatcaccgcctataacggcggcgcaggcagcgtgctgcgagtctttagcaatgataagattcaggctgccaatattattaacaccatgacgccgggcgatgtttatcagacgctgacgacccgccatccctctgcggaatctcgccgttatctttataaagtgaataccgcgcaaaaatcctaccgccgccgataattccattaaccgcccctgacgatgctcaggggcaaaaatgttatccacatcacaatttcgttttgcaaattgggaatgtttgcaattatttgccacaggtaacaaaaaaccagtccgcgaagttgatagaatcccatcatctcgcacggtcaaatgtgctttttcaaacactcatccgcatcacgatgtgaggaaattaacatgaatcttaagctgcagctgaaaatcctctcttttctgcagttctgtctgtggggaagttggctgacgaccctcggctcctatatgtttgttaccctgaagtttgacggtgcttctattggcgcagtttatagcagtctgggtatcgcagcggtctttatgcctgcgctgctggggattgtggccgacaaatggttaagtgcgaaatgggtatatgccatttgccacaccattggcgctatcacgctgttcatggcggcacaggtcacgacaccggaagcgatgttccttgtgatattgattaacagctttgcttatatgccaacgcttgggttaatcaacaccatctcttactatcgcctgcaaaatgccgggatggatatcgttactgacttcccgccaatccgtatctggggcaccatcggctttatcatggcaatgtgggtggtgagcctgtctggcttcgaattaagccacatgcagctgtatattggcgcagcactttccgccattctggttctgtttaccctgactctgccgcatattccggttgctaaacagcaagcgaatcagagctggacaaccctgctgggcctcgatgcattcgcgctgtttaaaaacaagcgtatggcaatcttctttatcttcagtatgctgctgggcgcggaactgcagattaccaacatgttcggtaataccttcctgcacagcttcgacaaagatccgatgtttgccagcagctttattgtgcagcatgcgagtatcatcatgagcattagccagatctctgaaaccctgttcattctgaccatcccgttcttcttaagccgctacggtattaagaacgtaatgatgatcagtattgtggcgtggatcctgcgttttgcgctgtttgcttacggcgacccgactccgttcggtactgtactgctggtactgagcatgatcgtttacggttgcgcattcgacttcttcaacatctctggtagcgtgtttgtcgaaaaagaagttagcccggcaattcgcgccagtgcacaagggatgttcctgatgatgactaacggcttcggctgtatcctcggcggcatcgtgagcggtaaagttgttgagatgtacacccaaaacggcattaccgactggcagaccgtatggttgattttcgctggttactccgtggttctggccttcgcgttcatggcgatgttcaaatataaacacgttcgtgtcccgacaggcacacagacggttagccactaattacgcaaagaaaaacgggtcgccagaaggtgacccgttttttttattcttacttcaacacataaccgtacaaccgtttcacgccatccgcatcggtttcgctataaacaccttgcagctccgggctaaatcccggcaacaaattcaccccttcttccagtgcaaggaaataacgttgaaccgccccaccccagacttccccgggtaccacgcaaagcacgccaggtggataaggcaacgccccttctgccgcaattcgcccttcggcatcacgaatccgcaccaactccacgtcaccgcgaatataagcgctatgcgcatcctgggggttcatcaccacactcgggaaactctgctggcggaacatcgctttttgtaggtctttgacgtcgaaactgacatacagatcgtgcatctcctgacacaactggcgcagggtgtagtcgcgatagcgcaccggatacttgttataaacgctcggcaacacctcaaccagcgggctgtcatcctcaatatgctgttcaaattgcgccagcatcgccaccagttgtgccagcttctcgtggctttccgccggagttaataaaaacagaatggagttgagatcgcacttctccggcacaatgccgttctcacgcagatagtgcgccagaatcgtcgccggaacgccaaagtcgctatattcgccggtttcggcatcgatacctggtgtagtgagtaacagcttgcacggatcaacaaaatactgatccgcggcatatccttcaaagccgtgccacttcgcccccggctcaaaactgaaaaaacggcggtcgctggctaacacacttgtcggataatcctgccacaatttgccatcaacaacgggcgggataaacgggcggaacagcttacagcgcgcaagaatagccttgcgcgcttcaatccctatctcaacacactcagcccacagccgacgcccactctccccttcatgaattttggcgttaacatccagtgcagcaaacagcggatagaaagggctggtagaagcatggagcataaaggcgttattcaaccgcttatgcgggcaaaaacgcgcctgtccgcggatatggttatcttttttatggatctggctcgtctgactgaatcccgcctgctgtttgtgcacgctctgagtcacaaagatccccggatcgttttcgttaagttctaacagcagcgggctgctatccgccatcatcgggataaattgttcataaccgacccacgcggaatcaaacagaatgtaatcacacagatgcccaacggtatcgatcacctgacgggcgttatagacagtgccgtcataggttcccagctgaataatcgccaggcgatacgggcgcggcaggtcggctttttctggcgcaacgtcgcgaatttgctggcgcagatactcttcattaaaacagtgcgcatcaataccgccaatgaaaccaaacgggttgcgactagcttccagatagaccggcgtcgcccccgcctgaatcagcgcgccgtgatgattgctcttatggttgttacggtcgaagagcaccagatcgccacgcgttaacagcgcattcgtcaccactttattcgctgcgcttgtgccgttcagcacaaaataggttttatcggcatgaaagactttggctgcgaatttctgcgcatctttcgcgcttccttcatgaataagcagatcgcccaattttacgtcagcgttacacatatcggcgcgaaagacgttctcaccaaagaaatcgtaaaaatggcgtccggcaggatgctttttaaaaaacgcaccatgttgatgtccagggcaagcaaaggtgctgttgcccatctcaacgtactgcgtcagcgtgtcataaaacggtggcagcaaattctcttcatactgacaggctgcggattccagctccagccactgctgctcgttgccgttgattaccgccgtaacgcccgcaggtaattcaacagcatgttcggaatacaaaaacaccggtagatgaaaaccggtgcgcttaagcaacgcaagaatgccactgcgactatccgcagcggtaatgacgactgccgcgacgtccgtaaaatcagtatctcccaacgccaccacgcgacgatgagaagaaagtcgggataccagttcactactggcggcaatattcatacttttcataagcgcaaacccgtttcggggaagtaagaataccggacaaggtggaaaaccctgccccatgagatatgggtcaaactggtcaccagctccgaccgccagacatcagtaaaagcagaaacgctctgattttactgttgtcctgcagtgagcgtgcgttaacttcaccgcatgagcagtaacatagaaagggaaacgtttcgcgcgaaacggcgataagcgagagaatgtaaggagatggcgtgcatcgggcaaactccgtacagagaggagaaaattcgcgcaatcatggcacctttcgctaaagcgtgcaagccaggactttgcgaacaaacaagccatcgacggcaccaaacggtcataataagaaaatcaaacaatacagctaacaggaactcttgtggtcatcggcccttttatcaacgctagtgcagtcttactgggtggcgttctcggcgcactgctcagccaacgcttaccggaacgtatccgcgtctccatgacaagtatttttggtctggcaagcctggggattggtattttactggtggtgaaatgtgccaaccttccagcgatggttttagctacgctacttggcgctctaattggcgaaatttgtttgctggagaaaggtgtcaatacagcagtcgccaaagcacaaaatctgtttcgtcacagtcgtaagaagccagcgcatgaatcttttattcagaattatgtcgcgattattgtcctgttttgcgccagcggcaccgggatcttcggggcgatgaacgaagggatgaccggcgatccgagtattttaatcgccaagagttttcttgatttctttacggcgatgatcttcgcctgcagcctgggtattgcggtaagcgtgattagtatcccattactgatcatccagttaacgctggcgtgggctgccgcgctgattttaccgctgaccacaccgagcatgatggcagacttcagcgccgtaggcggtttattgctgctggcaaccggattacgcatctgtggcattaaaatgttcccggtggtcaacatgcttccagcactccttctggcaatgccgctttccgccgcctggaccgcctggtttgcctgacaatgcgtgcaatatcggcaaagtgatgatagattgtgcagtctgcagtaaattgaagaaatttgattgacgagacgaggcgaatcaggtttaatgcgccccgttgcccggatagctcagtcggtagagcaggggattgaaaatccccgtgtccttggttcgattccgagtccgggcaccactaattcttaagaacccgcccacaaggcgggtttttgcttttggatctgacaataaccttcacgaaaaaaattagcttataaagtctgggggaattactctcgccacgttaacgagagtaattttattgatattaatctcctgatactttacccccgtccaaactccagccgctgcacattcaccatcccaggcttctcagcagcactgacatcaatttgtgtcacccgcagcgcatagaacgccattttgaatttacgaacggacgcattatcagtgactttaacggcatgggcaaagtgaaatatcattttttaacgataaaaagagtgttatttcttgtgtatcagacaataagcattcattcaaaacctttagaaataatcaaaacacaggtattccactggttaatatattcacatatgaaatgaataaatattggaatatataaatattgaatattttgattaatccccgtactgattattcttcataatcagtacggggttgctacaacatgtattactttttcaccacaattaacggttcaatatcactctcttttttgatgaccagactttcatcaccgcgcaaacacgtcccaccgtagttgccgccaacggtgaaggtacatacctgaatgtatttaccgtccactttcggcaaacaccacagttgctgatagatgtttttctgctcggcaaatttaccgctggttttgtccagcacctcttcatgatggctgacgaggtcgatattgctgccacagcgaccggcgatcggtttcactgcgtaacctgttttcaccagttcatcattaacagtgaaatcggtatccagcaggtaacgatggtgcgggaacaggctccagaggatcggcagaatcgctttgttgccggggatcaccgtccacagcggctcaaagaccagcacttccgggcgcagcaatacgtcgataagacgcacttcgttttgcggatgaccggtacggattggcaccgcagcaaactcacggtcgctaacttcacgaatctgatcaaacgcggtttcccacgcccaggttttccacacgcagttaaccagtcgcccttccccatcaatcagttgcccggcagcatcccagcccagttcatccaatccacgcaagatacgcgtttcaaagcccgcctggtgcagcgcctgctccataaactgcgcgtgatagttttcctcgatatctttgtcctgcatgatatggacaaacggacgtgcacgactgtgtttccaggcaccagccaattcgttaatcagcccttccgccggattgaagccgttgcctttatagccctgctccgcccaacgttcgaggatcaagcccgcttcggtatgacaggaggcggagtcggcgttgtactcgtaaaccttcaggccacgctcatccatgcagaaatccatacgaccagtgatcatatggtgacggcgacgctgccaggagagacgcaaacgtggccagaggattttcgggatgtcgaacagcgccagcaggttgtcatctttcagcaccttgtcggttgcgtgaagatacatcaggtgcagctcgttggtggctttaattagctcctgctcggcactctcggtaatggtgtagtaatgataaggatcctgattgatcacctgaccgttggcctgcacataggcgttttgcagcggatctttttcatccagccatttaccgtcaaactggcctttgttttccaggcgcgctccgctgattttcagcagctcgcctgcaatttccggctgcggtaagctgtattcagtatcttccgtctggatcatccagcccagaatggtggtgtcatcaaaagtgtctttcagggtatagcagccgttttcgaccaccatctccagctcgcgcgtccactgttgcccttgcggcaacggggaatgaatcacgttctgttccgcaatacggactttgttgccatgcaattgggtaatgatggcgacatggccagtgtctttaaattcaccgcctttatcccagataagaagcgcacccgcgaccggcgcacgcgggctgccgttaggaaatgcctgcaatggcaggatgttgtcattaaccacttctcgcaggaagcgcaggctgaaaatctcccacgccatacccacgtcagtaaagaccacaccgtaattcagaaagagaaaacggcgagcaaattcaacgcattgccacttgtggcccatatattcgtcgtcgatatagctacggaatacggcgtcatcttcgtattcctgcggatcgagagaactgtaatcactagagtagattgctaccccacctggggcgtagcccaataatgtcccgaacggggcatcctggctggtcgttcctttgctcatcactttacctttaacaatacaacctaagcagttggcgtaattgttgtgctctgattacctgctcagcgacattaaccggacagaggtcagactaatcatacacctcatcgcagcggctggcgcaaagggttaaaaaattcacattctgtacagcaagtgacctgctacactgcttcaacactaccactcagaaggcaactcactatgacagacaatacttatcagcccgcgaaagtctggacgtgggataaatccgctggcggcgcgttcgccaatatcaatcgcccggtttctggtccgacgcatgaaaaaacgctgcccgttggcaaacacccattgcaactttatagcctgggaacgccgaacggtcagaaagtaacgattatgcttgaggagctgctggcgctgggcgttactggtgcagagtacgacgcctggctgattcgtattggcgatggcgatcaattctccagcggctttgtcgaagtgaacccaaacagcaagatcccggcgctgcgcgatcatacgcataatccgccgatccgcgtgtttgaatctggtagcatcctgctttatctggcggagaaatttggctacttcctgccgcaggatttggcaaagcgtactgaaacgatgaactggctgttctggttacagggcgcggcaccgttcctcggcggtggttttggtcacttttaccattacgcaccggtaaagattgagtacgccatcaaccgctttaccatggaagccaaacgtctgctcgacgtgctggataagcaactggcgcagcataagtttgttgcgggcgatgagtacaccattgcggatatggcgatttggccgtggtttggcaacgtggtgttaggtggtgtgtatgatgccgctgagtttcttgatgcgggcagttataagcatgtacaacgctgggcgaaagaagtaggcgaacgtccggcggtgaaacgtgggcgtattgttaaccgcaccaacggaccgctgaatgagcagttgcatgagcgccatgacgccagtgatttcgagacgaatacggaagataagcgtcaggggtaagggttggtgttcgtcgcagcaagccatccaggccggataaggcgttcacgccgcatccggcaatcgtgcacaatgcctgatgcgacgctgccgcgtcttatcaggcctacgaaagctaatcatcacgcgctggtaatgtcgtaatccatttggcgcagtgcgtctaatgtggctttggcttcatcttcgtcgatgatgctcatggcaaatccgacgtgtaccagcacccactggcccagtagatcggcagggttaccttcacaaatcagggcgatattcacatcgcgcttgataccacatacttcaacctgcgcaagctggtgaatatcttcaccgacagccagcacctggcctggaacgccaatacacattattaactccggttattcaacttcaatacttttgacgatcaggctatcgccggtatcgacacgcaaccgctcgccgtgacagagcggacactgcgcatcgtgctgatgaatctccaccacctggctgcaatcccagcaccaagcctgggcgggtttatagacgatatgtaaatcgcacccttgcgccaccgttccgtggcagacaatttcaaaactaaaacggacggcgctctcctcaacgcaggagagcgcgccaatttccagccacacggcggtgacgcgcttaacatcgtgctgctccgcctgccgttggataatttcaacggcgctctggcaaagagacaactcatgcattttcgccactcctgcgaccaaacagcagggcgcgacgccctgcgtgtggtacatccggattcgtgactggcaggctaaggatcattcgtgcgcagtcatccgtcaggcgttggccctcttcaatgctcatgctgtggctaagcgggctcatcaggctacaggagagatattggctaacaccgtccagttcgccaacggtaaaggtcatagtgccatacggcagttgcagaccaattttttcactcactttgcgcagcggccagagttgatccgggccggggaagataactgcactcagcatccacggggtgatcacacaccccgtccactgaccttcgaacagcgtaaaatcagaaacatacaccggcatactaggatgcagaaaagagagatcgtgcatgctacgccgggcaatttcttcaaacgctgcctgtacttgcgccttcggggaggtctggaaacctgctatctcttcagtcatgaatcgcctcccgtgggatggcttccacgccagattcacgcagcgcagccagaacctgctcaagcgcaggttcaatcattgcttcaaccgtcggcgttaagccgatgtgtggctccaggctttccgggatcacgccgaccagggtcagctttttcggaaactcgccggtgaagcgcagggcgctcaagacgtcggccaggccaagctgatgcggagagattttgttggtaaacaacgccggaacttcttcatcccgcaggatcatcatcgttcccggcgcgttctttttgctgacaatggcatccgcaataatcaaatgatcgcgatttgccatgtcgccaagcagctccattcccgccgtgccgccatcgaggatctcaacataatccggcagaatgtatcgttgctctaacgcttcgacaatccgcacaccgatggcttcatcggtcagcaaaatattgccgacccctaagactaaaatacgcattacagaaccttcacactaaccacttcgttgccgtcagcatccactacgtgtaccgcacaggccatgcacgggtcaaaggagtgaatggtacgcaccacttccagcggtttattcggatcggcaaccggtgtacccaccaggctctgctcgtaaggaccgacgtcatcattgaagttacgcggaccagagttccaggtacttggaacaaccgcctggtagttgctgatgataccgtctttaataaccatccagtgagagagcataccgcgcggcgcttcgaggaagccaacacctttgaattcacccgttgccggaatgttcggcttcacaaaggtggtgtgatcgcctttgccgatattggtgatcagtgcactgtattggttttgcaggatatcctgcaattcacagcagtgaacggtacgaccaataatacggcccagcgtggagtgcagctgtgccacttccagcgtgttgccagtcagtttctgataaatcgcaacgatttcattcagtttgttctgggtagattcgcgacctgccgccagtttcaccagcatattagccagtggccccacttctaccgttttgccgtagaaagtcggacttttcacccaggaatatttcccgtcgtcagaccaaccatcataagccggaatggtggtgccttcccacggtgcctgcggcgcttcgtctttataccaggagtgcttcgcgctttcctgaatgcctttgatcaggtattcatcggaatgagaagtgatcggacgatagctggacagatccgcattctcaatgtagccgcccgggaacaggaagctgccgtttttactgtcggtcgggaattccggcacgctcaggtagttcaccgcacctttaccgcgtgtcagccattccgggtagaacgcggcaataactgcggtatcaaccttataaacctgctcaacaaagtcgctcagtttgtcgatgaaagacttgatgtacatcaggcgctcaaggttcagcacgcccaaaccgtcgaggttgatcgggttcgcgacaccacctaccgccaggttctgaatgtgcggcgttttaccgcccagcagcgccacgacgcggttagcgtcacgctggcactccaacgcttgcaggtagtgcgctaccgcaatcaggttcacttccggcggcagtttcatcgccggatgaccccagtagccattagcgaaaatacccaactgaccgctggcaaccagatctttgatcttgttctgaactttggtgaactcttccggactgttcaggtgccaggtgctaacgcctttcagcatttcggaggctttggttgggtcagcttgcagtgcagaagtgatgtccacccagtccagcgcgctaagctgatagaaatgaacaatatggtcatgcgtggtgtgcgcagccagaatgatgttacggatgtattgcgcgttaaccggaacgtcgatattcagcgcactttctgccgcacgaacggaagacagcgcgtgagtggtagtacatacgccacagatacgttgcacaatcatccatgcatcgcgcggatcgcggtttttcacgatctcttccatgccgcgccacatggtaccggaagcccatgctttgctaacgacgccattttcgatttcgcaatcgatgcgtaaatgcccctcaatacgggttaccggatcaatagtaattctctggctcatgctttgctcgcctcatgacgattatgatcgttttgttttaaaggaggaagtatcggcagtagacgaatgagtacgatgtaagcgcaaatctcaatagccacaaaaccaatagaaatcaacagttcttcccaggtcgggaagtaggcgtaaccgccgcccgggttgaatgccaccaggctataggtcagacgccaggttgcacaacctaacagtgcgctcagtgcactcaggaacagcatgcgggaatcattacgcagcttcgccacacgcagaacgaccagcgggaagagcatcagcaggacttcaatccagaacatcacggagtagaagtcaccggcaaacgctaagctcagcttgtcgcgatagataagctcgccaaagcgcagcacgatgaaaatcgccagcaacacactgatggtgttggtcagcttaacaaacagactcttttcatccggaccgttgccacgcagacccgcctgcaccaggctaccttcaaagatgacaatgctgaagcccatgatgaacgccgtcagcaggctgaacagcggcaacatttcatagctctgccacaacggatgcaccttgtagcccgcgctgatcatcaggctccccatactagactggtgcatggtcggcagcagcgcaccgagcgcgatgatgaagaacatcaccttgtttagtcgctgtaggctcaccttccaccccagacgttcaaacagtgccggagcaaactccagtgccatcacgccgatatagatggtcatacagaccgccgtctcgaacagtacgctgttcacgttgaagtgacccggaatgtagaagtacggcaggttccagtagcgacccacgtcgatagtgatgctcaagccacccagactgtaaccaaacagactcgccaacagcgccggacgcaccagcggatggtattgcccacggttaaagacgtataccgcccacgccagcgcccagccgccacaggcaaagccggtgccaatcagcaggtcaaacgcgatccacacgccccacgggaagccgccgttcaggtcagagacagagcccagaccgaacaccagacgcttcacaatcaggagcatacagatgacgattaacggtccaaaaatcatgaccggtttactgatgattttgccgcccagcggttgtggatcatgactcatgatcgtctcctccgtcgtgattattcaactctcatgatcgtctcctccgtcgtgatggtcgtttttggtgttgcgacgaaccagcacggttaagcccgccagcacagccagtggtagcatcatgcctttatacagggtgtgttgaatattttcggaacgcgcaccggtagaaagatcgtccagtttcggcaggtcgagattttcataaggcacacccgtcagtaccagaacctgagtaccgccgccctctttctcgccgtacagatgcggataatatttcggcaccgtatgcaggtaagtgtcgccagatttcagcgtctgacgcggatagtggtattcgctgccaggcttcagcgccagacgttttttcgcctccgccatcagctcttcacgcgtaccgaaaatcaccgcgcccgccgggcacacttctacgcagccaggtagaccgcctttatcgagacgttccacacctttctggttgcacagctcgcacttatgcagcgcaccaaacgggttgttgtagtcgtacttcggcacgttgtacggacaggcgaccatgcagtaacggcagccggtgcacacatctttgtcgtaatggacaatgccggttttcggatcttttttcagtgcagagaccgggcacacagagacacagttcggatcgacgcagtgcatacactgtttcttaatgtacgcgtagccgttctcctcctggtctttgttgacccctgtgccgctggtccacacctgaatgatgttattggtatacgggctcagtttgtcgttgttgctccaggtctgttccccttgcgggttacgttcagggaaattgatatcctgacacttggtgacgcaagcctggcagcctacgcacaaggtgctgtcgtacaacatccccaggcttcccggaattggcgggcggttttcagcagccgcatgactgacagacggcagcgcgcccgtcagcaatgccccgcaggaggctgctttaataaaattacgtctgttcacggttattctccccgactgtcagcgttatctttcttttgctgacgacccagttcacgcaccgccatcacgctgacaccggcaaccaacccaaccacaccgccgagcaaaccaatagcgcctgcagagacgttgccgccctctttagcgttaacatccggtttctgactacgcggagtttgattttcgacgttggcaagctgatggatgcctttatggaagccgataccttcttcgttacagccatagcaagggtgaccaatcgccaccggccacacaccgccaacatcgcagaattgcagcgtactgcagttgccgtaagtttctggccctttacagccgaggtggtacaggcaccagccttcgcggtggccttcatcaccgaactctttggcaaaacgaccagcatcgaagtgcgggcgacgttcgcagtgttcgtgaatcagacggccataggcgaaggtcggacggtttttgtcatccagtttcggcggtttgccgtaagtgatgatgtgcgcaacggtcgcgaggaagttgtgcgggttcggcgggcagcccggaatattgataacggttttgcctggcagaacttcttgcaggctgactgcgccagttgggttaactccagctgcggcaacaccgccccacgcagagcaggaaccgatagcgataatggctgctgcgccttccgccgctttgcggatgtgatccacaatcggctcaccggcaaccatgcaataaataccgttatcttttaatgggatggaaccatccaccactaacacatactgccctttgtacttctcgagagcgttatgtttgttctcttcgacctgatgaccgaaggcggcggaaagcacttcgtgatactccagagagatagtctccagtacgaggttttctaccgttggatgcgttgcacgaagcagagattccgtacaaccggtgcactcctgcgcgccaatccagataactggcggacgctgcgggttagtaacgctttcggccatctctgcagcggctttgctacttaaccccatggtggcggctaatgctgcacaaagcttcatgaaatcacgacggttaatgccgtgagaatggatgagggtgttatctccagtcatttatagttattccgttgcgaagacctggcatatattttgcctcaatcgcaaaatcaataatgcgatcgatgcgccatttaccacacatttattatggttatcgatatcatgatactgcggcggggcgctaaaacgaagggaagaagcattagtgtaattaattaaagcaagataatacgtatgtttgatcaattttcgaggcgataaccggccataaaaaagcgcaacgtagaacaggaattattctcacgaaagaaatccattaccatctctttatccagtccatagcggcgcgtcagaatacccgcttcccaggcgctaagctggcgatctccggtcttttcgtacatccggtgactgtagcctaatacaaaaccgcgtttataatcggcacagaattttgtcacattaaccgcactgtcggcatgcgttgcttttaatcccgccattaagcctttaccaaaatggttattcatcgttcacctcattcgctatatattgtcatatatagcgatattttaggcaaagaacgacttttgcgcacgctattttttcatgcttgtttaagacgtaatcccgtaagagataaacctatcaggagagatatttatcgaaccatttcagtgtcctttgccaggcaagatcggcggcagatttgtcataacggggcgtggaatcattatggaatccgtgattaacccccggatagatatacgcctcataaaccttattattggctttcaacgccgcctcgtaagcaggccagccctcgttgattcgggtgtccagttccgcgaagtggagtagtaaaggcgcttcaatcttcgccacatcggcagtgggtgcctgacgaccataaaacggcaccgcgcaggccagttccggatacgcgacagccgccgcgttgcttacgccaccgccatagcaaaatccggtaatacccactttgcctgtcgcttgcggatagcgttgcataaactcaattgcggcaaagaaatcattcatcagtttgttggatcaacctgctgttgcagctcacgacctttatcatcatttcccggataacctccaacggaacttaagccgtcaggtgccagggcgatataccccgccttcgccactcgccgtgccacatcttcgatatacggattcagtccacgattctcatgcaccaccactacggctggcgttttgccgctcatctttgcgggcttcaccagataaccccgcacctcgccgtgaccatttgggctaggatacgtgatgtactcagcaacaatttccgggtcggtaaactctacctgagtcgccagcgcataatttggcttgagcaaatcaaacaacgctaatgccgtcatcccgcctaccgcacttcgccgcaaggttgaggaactcacgtttcgagattttcccgtgagcgtaatagtcatagtaatccagcaactcttgtgggaaatctttggcggttaaacgcggcatcgttgcactcctcagttggtgtttttttaagcaaagcataagcacgtatttttgcccagtttttcgtcactctgtgagccagactacgggatacgcgctggcgaatcgctaaactagaaacattgtttcgaaattgaacggtggaaaggagaggtcatggtctggttagcgaatcccgaacgttacgggcagatgcaataccgctattgcggaaaaagtggtttacgcctgcccgcgttaagcctcggtttatggcacaatttcggtcacgttaacgcgctggaaagtcagcgtgcgatcctgcgtaaagcgtttgatttgggcattacgcactttgatttagccaacaattacgggccgcctccaggaagcgcagaagagaactttggtcgcctgctgcgggaggattttgccgcttatcgcgatgaactgattatctctaccaaggctggctacgatatgtggcccggcccttacggctctggcggtagtcgtaaatacctgctcgccagcctcgaccaaagcctgaagcgtatggggcttgagtatgtcgatatcttttactctcatcgcgtcgatgaaaatacgccgatggaagaaaccgcctctgcgctggctcatgcggtacaaagcggtaaggcgctgtatgtcgggatctcctcttacagcccagagcggacgcaaaaaatggtcgagttgctgcgcgagtggaaaattccgctgttaattcatcaacctagctacaatttactgaaccgctgggtggataaaagcggcctgctggataccctgcaaaataacggcgtgggctgtattgcctttactcctctggctcagggattgctgaccggaaaatatctcaacggcattccgcaagatagtcggatgcatcgtgaagggaataaagttcgtggtctgacaccgaaaatgcttaccgaagccaacctcaacagcctgcgcttattgaatgaaatggcacagcagcgtggacaaagtatggcgcaaatggcgttaagctggttgctgaaagatgatcgcgtgacgagcgtattgattggtgccagccgcgcggagcaactagaggagaacgtgcaggcgctgaataatctgacatttagcaccaaggagctggcgcagattgatcagcatatcgccgatggcgagctgaatctgtggcaggcgtcttccgataaatgacctgttaataacgggcgcgcgaaccgcgcccgaatcagatcagtgattatgacgagtcagtcggtcaagatagcccatcacaaatgcagaaagcacaaacgtcagatggataatgacgtaccacatcagtttgttatccgggacatttttcgcatccataaagacgcgcagtaagtgaatggaagaaattgccacaatgctcgctgctactttgtttttcaggctcgttgcgtccattttccccagccagttcagcttctctttgttctcggagatatccagctgactgacgaaattctcataaccggaaaacatcaccatcaccagcaaaccgccaaccagcgtcatatccaccaggctcagcaacacgaggatcaaatcactttccgccatgctgaagatattcggcagtacgtgaataatctcctggaagaacttcagcgccagggcaactaacgccaggctaaggccaaagtacacgggggcaagcagccagcgagaagcatacattgcattttcaagaaaacgttccatacattcctgtcgtgtagttaaaacgggcaacagtatatcgcaattgagtaaacagcacgcaacagcaaatcaacatatacgttaaacctttgtcgcataattctgaggtttagggatcttcctggttcccttatcaacgcatcgagaacgtctacccttaaaggacgttgaacctgaagggagaaaaacgatgtctcatttaaaagacccgaccacgcagtattacactggtgaatatcccaaacagaaacaaccgacgccaggcatccaggcgaagatgacaccggtaccggattgcggcgagaaaacctatgttggtagcggtcgcctgaaagatcgtaaagcactggtgacagggggcgattccggaataggtcgcgctgccgccatcgcttacgcgcgtgaaggggctgacgtggcgatcagttatcttcccgtggaagaagaagacgctcaggatgtgaaaaagatcattgaagaatgcggacgcaaagccgttctgctgccaggcgatttaagcgatgagaaatttgcccgtagcctggttcacgaagcgcacaaggcgttaggcgggctggatattatggcgctggtcgccgggaaacaggttgccattccggatattgcagacctcaccagcgaacagtttcaaaagacctttgccattaacgttttcgcgctgttctggctaacccaggaagcgatccccctgctaccgaaaggtgcaagtatcatcaccactagcagtatccaggcataccagccaagtccgcatttactggactatgcggctacgaaggcggcgattctgaactacagccgtggcttggcaaaacaggtcgcggagaaaggtattcgggtgaatattgtcgcgccaggcccgatctggacagcactgcaaatttccggcggacaaacgcaggataagatcccgcagtttggtcagcaaacgccgatgaaacgtgcggggcaaccggcggaactggcccctgtatatgtttatctggcaagtcaggagagcagctacgtcaccgcagaagtgcacggcgtgtgcggcggcgagcatttaggttaaaaaaatgcccggttgtgaaaagcaaccgggcatcattgtgaattcactcttacctgatgtggcgaaaacgccttatccgcctacaaacgcatgaagattcaacatgttgcaatagattttgtaggcctgataagcgtagcgcatcaggcattgagcacctaatgccggatgcgtcgtgaacgccttatccggcctacaaacgcacgaagattcaacatgttgcaatagattttgtaggcctgatgagcgtagcgcatcaggcaattctactttacttcgctttggcggtttcttcgccgaccagacctatcttcaggtaacccgcctgatgcagcgtatccattaccttcatcaacgtctcgtaatcgacggttttgtccgctcggaagaagatggtggtgtctttcttgccttcggttaacgcattcaacgccgtaatcattgtttcatcggtgaccggatcgttaccgataaacatgctgttgtctgccttcacgctcagataaaccggtttttccgggcgcggctgcggcgtgctggtagaagcaggcaagttcaccttcacatctaccgtcgctaacggtgccgccaccataaagataatcagcagaaccaacatcacgtcgataaacggcgtcacgttgatatcatgcatttcgccgttatcgtcgaggttttcgttaagatgcattgccatcggatattatcctgcgcgtaatttttgtgcgacacgaaccggatgcgcagcggcgctggcttccagatccaggtcacggctttgcagcaacaatacctgcgctgcaacatcacccagcatcgctttaaagccgccaatctggcgtgcaaatacgttatagataacgaccgcaggaatcgctgccacgaggccgattgccgttgctaacagagcttctgcgatacccggcgcaacgactgccaggttagtggtctgcgtttgcgcgataccaataaagctgttcatgatgccccagaccgtaccaaacagaccaacgaacggagaaatcgcgccgatggttgccagatagccgttaccgcggcccatttgacgacccactgcggcgacccgacgctccagacggaagctggtacgttctttaataccttcgttatcgtcgctgccttcactcagttccagctcattctgcgcttcattgagcaaatgcaggcttaagcttttgctaccaaaatcagcggcgatatcgttggcctggtttaaggaacgcgcttcagccagcagttgctgctcgcgcttaaggcgacgcttctgattgaagaactctacgctcttactgaagaagattgcccaggtgactacggaggccaaaataagcccaatcatcacgcacttaacgacaatatcggcgtgctgatacataccccagacggaaaggtccgtctgcattaaattattacccactgtgtatctccaggacgcaagtcacaaaatctgcgcataataatatcaaaacgacgtcgaattgatagtcgttctcattactatttgcatactgccgtacctttgctttcttttccttgcgtttacgcagtaaaaaagtcaccagcacgccatttgcgaaaattttctgctttatgccaattcttcaggatgcgcccgcgaatattcatgctagtttagacatccagacgtataaaaacaggaatcccgacatggcggacaaaaagcttgatactcaactggtgaatgcaggacgcagcaaaaaatacactctcggcgcggtaaatagcgtgattcagcgcgcttctagcctggtctttgacagtgtagaagccaaaaaacacgcgacacgtaatcgcgccaatggagagttgttctatggacggcgcggaacgttaacccatttctccttacaacaagcgatgtgtgaactggaaggtggcgcaggctgcgtgctatttccctgcggggcggcagcggttgctaattccattcttgcttttatcgaacagggcgatcatgtgttgatgaccaacaccgcctatgaaccgagtcaggatttctgtagcaaaatcctcagcaaactgggcgtaacgacaagttggtttgatccgctgattggtgccgatatcgttaagcatctgcagccaaacactaaaatcgtgtttctggaaagcccaggctccatcaccatggaagtccacgacgttccggcgattgttgccgccgtacgcagtgtggtgccggatgccatcattatgatcgacaacacctgggcagccggtgtgctgtttaaggcgctggattttggcatcgatgtttctattcaagccgccaccaaatatctggttgggcatagtgatgcgatgattggcactgccgtgtgcaatgcccgttgctgggagcagctacgggaaaatgcctatctgatgggccagatggtcgatgccgataccgcctatataaccagccgtggcctgcgcacattaggtgtgcgtttgcgtcaacatcatgaaagcagtctgaaagtggctgaatggctggcagaacatccgcaagttgcgcgagttaaccaccctgctctgcctggcagtaaaggtcacgaattctggaaacgagactttacaggcagcagcgggctattttcctttgtgcttaagaaaaaactcaataatgaagagctggcgaactatctggataacttcagtttattcagcatggcctacagctggggcgggtatgaaagcttgatcctggcaaatcaaccagaacatatcgccgccattcgcccacaaggcgagatcgattttagcgggaccttgattcgcctgcatattggtctggaagatgtcgacgatctgattgccgatctggacgccggttttgcgcgaattgtataacattgccacttttggacaattttgcagacattttattgtgaaaagtcttaaattgttgcgtccgggatcaaggcgtcccggacgattcaggagtacaataggcagataaaggcttaaacgctgttccacaggaaagtccatggctgttattcaagatatcatcgctgcgctctggcaacacgactttgccgcgctggcggatcctcatattgttagcgttgtttactttgtcatgtttgccacgctgtttttagaaaacggcctgctgcccgccagttttttgccaggcgacagcttgttgatactggcaggcgcattgattgcccagggggttatggattttctgcctacgattgcgattctgaccgccgcagcaagtctgggctgctggctaagttatattcaggggcgctggttagggaataccaaaacggtgaaaggctggctggcacagcttcctgctaaatatcaccagcgcgccacctgcatgtttgaccgccacggtctgctggcgctgctggctggacgttttcttgcatttgtccgtacgctgctgccaaccatggcgggaatttccggtctgccaaaccgccgcttccagtttttcaactggttaagtggattgctgtgggtcagcgtggtaaccagttttggctatgccttaagtatgattccgttcgttaaacgccatgaagatcaggtaatgacgttcctgatgatcctgccaattgccttgttaaccgctggcttgttaggcacgctgtttgtggtgattaaaaaaaaatactgtaacgcctgacgattttccccgttcccggttgctgtaccgggaacgtatttaattcccctgcatcgcccgcattcttgccgcatcttcccccggcgtcacaccgaagtaacgtttaaactcacggctaaattggcttgcgctttcatagccgacgcgcatcgctgctgcgctggccttcatgccgtcatggatgatcatcatccgcgccttatgcagacggtaattcttcaaatactgcaacgggctggtactggtgacagacttaaaattatggtggaacgcgcttacgctcatgttggcttctgccgccagttgctcgacgctcaggttttcggtgtatttattctcaatccgtttcagcacgcggctaatcagactgaagtgagtctggcgactgaccagcgccagtaacgcgccgccgcaaggtccggtcagcacgtagtacagaatttcgcggatgatctgtttgccgagaatacgcgcatccagtggtcgctccatcacgtcgagtaaccgctccgccgcgcataaaatctcttcacttaacgtggcggagttaatcccgctggctgccatgctcggctggaaatgctcatcttcgccaatgtccatcaacagttcctgtaactgcaaaatatcgacattgagacgcaaccctgccagcggcacctcactcgtggcataggtttcgcactcaaacggcaacggcaccgtcagcagcaggtattcattggcatcataacgaaacacgcgttcattgatataaccgattttatgcccggaaaagagaattatgatgccaggctcgtacatcaccggtgtacgtgcgaaaggcgtctcgccatacaacaaacgcacatcgggcaacagtccactcaaactattttctttatttttcagtttattaactttatccgccagcaagcggcaaatctcttcacgtttcatatcgcgtaatttcttaggaataatgcggcaattactttgtgcgcaattttgtagcatttctccagcactctggagaaataggcaagacattggcagaaatgagcattgagagccagggcgctggcgatcacaatgaaaaacatcaggcagatcgttctctgccctcatattggcccagcaaagggagcaagtaatgaacaactttaatctgcacaccccaacccgcattctgtttggtaaaggcgcaatcgctggtttacgcgaacaaattcctcacgatgctcgcgtattgattacctacggcggcggcagcgtgaaaaaaaccggcgttctcgatcaagttctggatgccctgaaaggcatggacgtgctggaatttggcggtattgagccaaacccggcttatgaaacgctgatgaacgccgtgaaactggttcgcgaacagaaagtgactttcctgctggcggttggcggcggttctgtactggacggcaccaaatttatcgccgcagcggctaactatccggaaaatatcgatccgtggcacattctgcaaacgggcggtaaagagattaaaagcgccatcccgatgggctgtgtgctgacgctgccagcaaccggtagtgaatccaacgcaggcgcggtgatctcccgtaaaaccacaggcgacaagcaggcgttccattctgcccatgttcagccggtatttgccgtgctcgatccggtttatacctacaccctgccgccgcgtcaggtggctaacggcgtagtggacgcctttgtacacaccgtggaacagtatgttaccaaaccggttgatgccaaaattcaggaccgtttcgcagaaggcattttgctgacgctaatcgaagatggtccgaaagccctgaaagagccagaaaactacgatgtgcgcgccaacgtcatgtgggcggcgactcaggcgctgaacggtttgattggcgctggcgtaccgcaggactgggcaacgcatatgctgggccacgaactgactgcgatgcacggtctggatcacgcgcaaacactggctatcgtcctgcctgcactgtggaatgaaaaacgcgataccaagcgcgctaagctgctgcaatatgctgaacgcgtctggaacatcactgaaggttccgatgatgagcgtattgacgccgcgattgccgcaacccgcaatttctttgagcaattaggcgtgccgacccacctctccgactacggtctggacggcagctccatcccggctttgctgaaaaaactggaagagcacggcatgacccaactgggcgaaaatcatgacattacgttggatgtcagccgccgtatatacgaagccgcccgctaagctttttacgcctcaaactttcgttttcgggcatttcgtccagacttaagttcacaacacctcaccggagcctgctccggtgagttcatataaaggaggaacgtatggctaatccaaccgttattaagctacaggatggcaatgtcatgccccagctgggactgggcgtctggcaagcaagtaatgaggaagtaatcaccgccattcaaaaagcgttagaagtgggttatcgcagcattgataccgccgcggcctacaagaacgaagaaggtgtcggcaaagccctgaaaaatgccagtgtcaacagagaagaactgttcatcaccactaagctgtggaacgacgaccacaagcgcccccgcgaagccctgctcgacagcctgaaaaaactccagcttgattatatcgacctctacttaatgcactggcccgttcccgctatcgaccattatgtcgaagcatggaaaggcatgatcgaattgcaaaaagagggattaatcaaaagcatcggcgtgtgcaacttccagatccatcacctgcaacgcctgattgatgaaactggcgtgacgcctgtgataaaccagatcgaacttcatccgctgatgcaacaacgccagctacacgcctggaacgcgacacacaaaatccagaccgaatcctggagcccattagcgcaaggagggaaaggcgttttcgatcagaaagtcattcgcgatctggcagataaatacggcaaaaccccggcgcagattgttatccgctggcatctggatagcggcctggtggtgatcccgaaaagcgtcacacctagtcgtattgccgaaaactttgatgtctgggatttccgtctcgacaaagacgaactcggcgaaattgcaaaactcgatcagggcaagcgtctcggtcccgatcctgaccagttcggcggctaacatgcaaattctcccggtggcggtaatgttccgctaccggacttttcagaaatcatttattcccctcgcgtcccgcccgttgttactcttccttgttcaggaatgccaaatataaggacatcatcatgcagagccggaagctcttaaaagaacaactcatctatatccgggataaacgcaacggagaggtgaaaaacagatgaaaataatacttctgtttttagcagccctggcaagttttaccgtacacgcacagccccccagtcagaccgtagaacaaacagtccggcatatttatcagaactataaaagtgatgccactgccccttattttggtgaaaccggagagcgggcgataacttctgcgcgtattcaacaggcgcttaccctgaacgacaatcttacgctgccgggcaatattggctggctggattatgatccggtttgtgattgtcaggattttggcgatctggtgctagaaagcgttgcgataacccaaactgacgccgatcatgccgatgccgttgtgcgctttcgtatctttaaagatgataaagaaaagaccacgcagacactgaaaatggtggcggaaaatggtcgttgggtcattgacgatattgtcagcaatcatggcagcgtcttacaagcagttaatagcgagaatgaaaaaacgctggccgctttagctagcttgcaaaaagaacagccggaagcctttgttgccgaactctttgaacatattgctgattatagctggccgtggacgtgggtggtttccgactcttaccgccaggcggttaatgccttctataaaaccaccttcaagacggccaataatcccgatgaagatatgcaaatagaacggcaatttatttacgacaatccgatctgttttggcgaagagagcctatttagtcgcgttgatgaaattcgagtcctggagaaaaccgccgattccgcccgcattcatgttcgttttacgctgaccaatggcaacaacgaagagcaagaactggttttacagcggcgcgaaggcaagtgggaaatcgctgattttatccgcccgaacagcggcagcctacttaagcagattgaggcaaaaactgccgccagattaaagcaatgagctgaattaaataacaattagccggaacaataaataaaagggaacactatatgaaaacgattttcaccgtgggagctgttgttctggcaacctgcttgctcagtggctgcgtcaatgagcaaaaggtcaatcagctggcgagcaatgtgcaaacattaaatgccaaaatcgcccggcttgagcaggatatgaaagcactacgcccacaaatctatgctgccaaatccgaagctaacagagccaatacgcgtcttgatgctcaggactattttgattgcctgcgctgcttgcgtatgtacgcagaatgataaaaaaatccccggtagcgtgtcagttgccggggatattttttaacgtccaaccgccgctttaggccgtttcttcgcaccagcattcaccggacgagattgcgtagagctcgctttttttgccgtagcaggcgtctgacgctgggtcgccatcggcgtatgtttcgtcaacgccggacgggtattgcggttctggcgacgagcttcacgcatctcttcaatggttggcgcaggcactaagcaatcgcgacggctgccaatcagatgctttttgcccatcgcttccagcgcctggcggattaacggccagtttgccggatcgtggtaacgcaacaacgctttatgcaaacgacgctgtttgtcgcccttcggtacgaagacgtcttcgctcttataaccaatcttcgccagcgggtttttcccggtgtaatacatggtggtactgttcgccagcgggctcggatagaagttctgcacctggtcgaggcggaagcggtgctttttcagccacagcgccagattcaccatatcttcatcacgcgtaccggggtgcgcggagatgaaataggggatcagatactgctctttacctgcctgtttactgtaagtatcgaacagctctttaaagcggtcatagctgcccatgcccggcttcatcatcttgcttaacggcccttcttcggtatgttccggggcaatcttcagataaccgccgacgtgatgggtcgccagttctttgatatagcgcggatcttctacggctatgtcataacgcacaccagaggcaatcaggatctttttaatgcctttcagatcacgcgcacggcgatagaggttgatcgttggttcgtggttcgtgtccatgtgcggacaaatatccggataaacgcagctcaaacggcgacaagtttgttcagcgcgtgggcttttgcagcgcaacatatacatgttggcagttggcccaccaagatcggaaatcacgcccgtaaaacctggaacggtgtcgcggatcgcttcgatctcattaatgatgctatcttcggaacggctctgaataatgcgcccttcgtgctcggtgatagaacagaaagagcagccgccaaagcagccacgcataatgttgacgctaaaacggatcatttcgtaagccggaatacgggcattgccataggccggatgtggcacgcgcttgtatggcagcgcaaaaacgctgtccatctcttcggtagaaagcggaatagcaggcgggttgatccacacatagcggtcgccgtgtttttgcatcaatgcgcgggcacagcctgggttggtttcgtggtgcagaatacggctagcatgggcgtacagcactttatcgcccttcactttctcgaaagaaggcagcaacacgtaggttttttcccacggtttcgggcgcggtggctgcacggttacggctttggcttcctgctttttcggtgccaccggtttgttatccgcgcacggcaaatcttcaccatacggatgcgggattgggtcgatttttccaggggtatcaagacgggtggaatccacgccgctccagccaggcagcgcctctttcacgataatcgcggtattacgcacatcgcggatttcactaattggctcgcccatcgccagacgatgcgccacttccaccagcggacgctcaccgttaccaaacatcagcatgtcggctttgctatccaccagcacggaacggcgcacggtatcggaccagtaatcataatgcgcggtacggcgcagactagcctcaataccgccgaggatcaccggtacatctttccacgcctctttacaacgctgggtataaaccagtgtggcgcgatccgggcgcttacccgcgacgttatccggcgtgtaggcatcgtcatgacgtaaacggcgatcggcggtataacggttgatcatgctatccatgttgccagcagtaacaccgaaaaacagattcggtttacccagacgcataaagtcgtctttgctgctccagtccggctgggcgatgatcccgacgcgaaagccctgcgcttccagcatacgaccgcaaatcgccatcccgaagcttgggtgatcgacatacgcgtcgccagtaaccaaaatgatgtcgcagctatcccagccaagttgatccatctcttcacgagacatcggcaaaaacggtgccggtccaaaacaggcggcccagtactgcggccaggagaacaggtcgcgatccggttggatcagggagatagagctcattttgcttccagaaatgataaaaaaataatcaaaggccggggattataagccggaacgaaagagaaatcgaaaggtattccatactcgccctcctcgggcgagtatgaagattacggtaccggattgaccaacagttgcccaatgctgccacggtccgccatttccagcgtctgactgttgaagtagaacgggaagtgcgcccaggaaggctgaccgaaataaacaagcagctccacttgtccgtcaacccaaacggtatctttccagcctctgtcttccgggaacggcatcgcgccattcacgttacggatctggaacattacgccttcaatatggaacgcttgcggctcgtccgcgcgtaccgtccagcgttcccacgttccttgctgcgcggtgacatcaatacggttgacgtcccacagctgtccattaatacccgggtcatcacccagactgatatcgcgactgcgaattgggctaccagccatgatttcagttggcagcaagcgcatcggaagactgtctgtgaccagcggcagaaggccggttgggcgcagcgttagcaccagggtagaaaccagaatactggatggctcaaagaagccacgaatacgatcaacaatgctcgccgcttcgccacaggtgatgctcacttcatcgccgttgctcatatccaccagaatctcgcggcgctcgcccggtgccaggctaagttgcttcacgcttacaggagcaggcaggaatccctgatcgccagaaatcacatgtaacgggcgaccatcgttcatctgtagttgatagcgacgagagttgctcgcgttcagcagtcgcaagcgcacccagccacggctgacttcaacgtacgggctttgtacaccgttaaccagcagcgtatcaccaacaaagccgccgcttcccggttcgttgtattctggcgtaccaaagttatccagccgtttatcctggataatgaccggaaaatcatccacaccataatggttggggataggcaggctcttgctgacttcatcttccaccagccacattccggcaaggccgttatagacctgctgagccgtgcggttgggagtattggcgtgataccacagagtagctgcgttctggcgaatgggcagtacgggtgcccagtcagcgtttgggctcatcatccgtgccggaccgcccatcagcgggcctggtacctgtagcccggccaccgtcatactgacattttctgtcaggcggttgctgtaaataagcttaacatcgtcgcccttccagacgcggatagtcggccccaggtaacgaccattgattccccagacgctcgcgcgtgtccctggcgtaaaactccagtgcgcacgttgtacagtcataaacagcggttgcccacggcgagattcaagtagcggcggaacgggtagcggttgctgttgcccggctgcgctggccttcaggggaacagcgcctgcacaaagtgcaatcccgcttgcctgaatgaactgacgccgactgagactcatatttgctccatgtaaaactggctaaagtaataccgtgcaggaaagtgttccccgcaaaaatacagattgccgacttaaacttttccggcggcttcgcgttctgcgacttctttatcgagctcggcgattttttgttccattatgctacgacaatgggcagccagctcacgaacctgatctttgccatactgactgacgtcaattggcggcagcatttcgacaatcaccagaccgttgtgcagtcgattaagattaatcttattgctagttgtagagacgcacacgggaataatcgggacgcccgccgcaattgccgcgtgaaatgctccagtcttgaacggtagcaggccgcgaccacggctgcgggttccttccgggaacatccagatggaaatacggcgttttttgaagtgattcactacttccgcaatggtgccgtgagctttagtgcgattgtttctgtcgatcaataagttgccggttaaccagtacaactgcccgaagaaggggatccacagcaagctctttttacctaccgtcaccgtcggcggttgcacgatgttgcttgctgtcaccatgtcatagttgttctggtggttagcgatatagatagcattgccgtagctttcagcgtctgtaggtttacggcactcaactttcaggccaaacagcggcgcaagacggccaaacatatgcccaaaggtggccacatgtttcgggttacgcgggctgaaaaggcagtaaatggagccgaatacacagactaagatgctgtaaatcacggtaataataagacgaaagatatatagcataacaccctctgaaggtctgagagactggcattgtacgtcacctgaaatcaggttagggcattgttaaaagccgctctctggaaaagcgtattgttaatcgcaacgcatgaataaacaacggtttcaagggaatttttatcgtttccgggggttgaatacgctgccggatgacgacttaacgtttcatccggcgttccttgcaagcgggaggaaacagcgccctccccggcatattactcttcgctatcaccgctgctggcacggcgaggagagtcgatctcaacacgatcgatacgctgcaaaccgcgcatcaacgtaccgcggcgtccacgttcgccagtgactttctgtaactcttccgggcgcagtttaattttgcgtttcccaacatgaatggtcagcgtgctttgcggcggcagaacgtacaattgcgccagaccatcttctccacgcgcggcttctgcgcttggaatgttgataatcttgttgcctttgcccttgctcagctgcggcagatcacttaccgggaacatcaacatacggcctgcctgagtgattgccagcagcatatcggaagcatcttcaatcaccaccggcggcataacatgggcattttccggtaaggtgatcaaagccttacctgcacggttacgcgccaccagatcgttaaaggtgcagacgaaaccgtaacccgcatcggaagccatcagcagtttctgatcgtcgctttccatcagcatatggtcaacggtcgccccaggcggcaacgttaatttgccggtgagcggctcgccctgaccacgcgcgctcggcagcgtaatcgggtcaatggcatagctacgaccggtggaatcaacaaacactaccggttggttgctcttacctttcaccgccgctttgaagctatcacccgctttataattcaggcccggcgcgtcgatatcatggcctttagcgctgcgtacccagcccatctggctcagcacaatggtgacaggttcagacggcagcatgtcgtgctcgctcatcgctttcgcttcttcgcgttcctgcaacgggctacgacgatcgtcaccgtaggcttgcgcgtctgcctgcagttctttcttcagcaggttattcattttacgctcggaagccaaaatgccctgcaactggtcgcgctctttttccagttcactctgctcaccgcgaatcttcatctcttccagtttggcaagatgacgcagtttcagttcgaggatcgcttccgcctgggtttccgtaaggccaaaccggctcatcagcgccggtttcggttcatcttcattacgaatgatctcaatcacttcgtcgatattgagaaacgccaccagcaaaccttcgaggatatgcaggcgcttgaggactttctccagacgatagttcagtcggcggcgcacggtatcgcggcggaacaccagccattcggagaggatttccagcaggtttttcaccgccggacgaccatccagaccgatcatattaaggttaatacgatagctcttttccagatcggtggtagcgaagaggtggttcatcacctgatccatatccacgcggttggaacgcggcacaatcaccaggcgggtcgggttctcgtggtcagattcatcgcgcagatcgtcaaccatcggcagctttttgttgcgcatttgcgcagcaatttgctccagtacgcgcgcaccactaacctgatgcggcaatgcgctgataaccaccgcgccatcttctttcttccacaccgcgcgcatacgcacactaccacgtccgttctcgtagattttacggatctcggcgcggctagtgataatttccgcttcagtcggataatccggcccctgcacgatatccagcagctgatcgagcgtggttttcggctggtcgattaatgcgattgccgcctgagccacttcacgcaggttatgcggtggaatatcggtcgccatgccgacggcaataccggtggtgccgttaagcaaaatgtttggcagacgggcaggtagcattttcggctcctgcaaagtgccgtcgaagtttggcacccagtcagccgtcccctgccccagctcgctcaatagcagctcggaatatttgctcaaccgggattcggtgtaacgcattgccgcgaagcttttcggatcgtccggcgcgccccagttcccctgaccatcaaccagcggataacggtaagagaacggttgcgccatcaggaccatcgcttcataacaggcgctatcgccgtgcggatggtatttacccagtacgtcaccgacggtacgggcgctttttttaaatttggcgctggcattcaggcccagttcagacatcgcatacacaatgcggcgctgaacaggtttcagaccatcaccaataaacggcaacgcacggtccatgatcacgtacatggagtagtttaagtaggcgttttccgtaaattcatgtagcgcaaggcgctctgccatatcgctcattaattctgattcctcaacttattcgccagccttcaaaggggcaatattgccggagatactacattatctgccgcgtcgagtcacaggagatcaacgtgaatagcgccgccggacgtgctccgacggcgataaaggcatcaatgtgccttgatatacaactctttgctgtagacataatcctggggattatgcagcggaaaaccgccaacgtagggtttaagcagtttgattaacggctgatagtagataggaatcagcggtgcctgttggttgatgatcacttctgcctgctgatacaacgcattacgctttgtcgcatcagtgatctgcgtggcctggtttagtaaggcgtcatactgcgcatttttccagtgaccgacgttttcttcactatcgcttttgagcgtgttcaggaagctggaagcatcattgtacgtcgcatcccagctctgccgagacagcatgaaatcaccggctcgtcgggcatcaagataggttttccactccattgtgcgcagcgtcacctgtgcacccagccattttttccattcggaagacaacgctatcgcggtcttttcatgcagatcgtacttgttgtagaacagctcaaagcgtagcggatgagaggcgtcgtatcccgcctgtttcagcaaggcttttgccatcgcgacgcgctcactcattggcttttgcagttcatcgaacgtcgtcgcgctaaagccttttacctctggcggcgtcagcgtggttgcgggcgttctcaaccccagtaccttttgcgcaataagctgtcgatcaaccgtaagatatagcgcccgacgcactcgcacatcgttaaatggcggtttctcaaggttgaagttgtaatattcgctgttcagacgcggaataattcgtagctcgccaggcagacttttttcaatggcgggaatttgctgcgccggaacccaggtgagatcgacctctcccgcgcgatagcggttatagccggtgacgctattatctagcgccagatactcaacctgttgcaatactgtatgttgcgcatcgcggtactttggatttttgcgtgcagtaatcttttcgttaactacccactgatcaagcacaaaggcaccgttgtaaaccatgttctctggcttactccagctatcgccatgtttagcgatgacatgatgaggaaccgggaacagcgtcggccaggcgagcatcgtcgtgaaccaaggaaccggctgctcaagcgtaacttcaagagtacgatcatccgtcgctttgacacccaggcttgtaacatctgctttacccgcaacaatagctgcggcattgttaatgtgcgcctgtgccagatagccagcaaaagggcttgccgttttcgggtcaaccgcgcgctgccagccgaggacaaaatcctctgccgtcagaggctgaccgtcggaccactgcaaaccgctacgcagatggaaaatatagcgcttgccgccgtccagtatctcccagcgttcagcctgagcgggctgcacctggccttcaccgtccatccataccagaccttcaaacagatccagcacaatctgcgcggcagtattctcctccaccttttgcgggtcgagcgtacctgggtcgctatgattgttgtaacgaaagacttgttgcggggcgagcggtgtgttggcgggaacgtcagcagcgtagagaggagccgcacttaccaggctgaccagccataataaatttcgcgtatacatggtattccttaccggagaaattataagcccaacaacaatacgcctgtggcattgttcgctcaaacttatcgcgagtgatttggctcacactccggtaaagaaaaaagcgagttgcccccgcttttccattaattaacggatttcattcaatagttctggatgcttatccagaacacgtaaaagtttgattgtggaaggatgaggttgggcattgcctttttcgtaacggctaaacgcatttacacctcccccaaaaatttcgcttgcctctttttgggtaagagagagcttttttcgaaccttcactataaattcaggtgccactgtttcggcattcacgctagcccgaaatgcctttacttgcgccatgaaagcatcactctcttctttattcatgatgctctcttcgcaatggacacaatataaaccgtggatacctttcaatactgtttttcgtccacggaaggtgtatggaatatctttaatgccagaaaccatttctccctggtggcaaaccggacatttcatattacttctccttaaagctgacgatcagtacgtcatgaattaccgtaattttaagataaacctggcctgtaacaagcctgggtctgtaaacatcctgccagatagtatgatcagagtaggtggtcatgcttttataaaagtcgctctcacttaatccaatgataacattacacataccatcaaaatccaaacctaactcatctgcatttaacagggcactacgtgttgtacgaacttgcccggcattgacaagttttttaacctgactcaaacgtgtatgtggtgtgcgtttttccataacccccgcctccctgttactttagttataacctaaaaggttaattacagcaatgaaaaagcacctaaaaggttagttagatgtacggagatagtgaccacacaaaacgtattctttaaggaaagtgattgaccatataagaaagtggcgcattagtagcgccagtttgaagcaggaatttataagggaagctggagtcaggcatcacgccaacggcacataaacatccgtttccagtcgctgctctgtcaccccttcggcaagattggtgtagtgaaacagaatcggtgctttacgcattttctcgccgcttgcaggcagccagtggcgaatgatgccccataccgtgtgactaatatcgtccagctcgccaacgtggcgggccacggcataacgtccaccggtaagttcaccattgctcacaccataacgattatcgggaatcggttcgctaacgctgccgcagatatcaaagcgaaacgcttccggtgcggtggtggcagggtcgtcccaggcgacgccaaaagtctggctttggttaacaggagaaagccccgtctctttacgccacatgataaatttcgccacgctgtagttgagcaattcagggctacagcggtgcggcaacatcgccacaggtatacttgggaaatcgataatgtttacatccagtgtcaggtttgtcattttgcctccctgcgaaattattcccgggaacgcgtcccgggagcggtaacaattacggatttactttgcggatctgtttgacgtcaatttcaacagaattccagtctttatcgacttcaccctgaatctcaaccgtatctttcggcgtcaccgtcacgccgttccagcgtttgtggtcgatatcaacattgatagtaccgctggcatctttgaacacgtagagatcgtcagagatgcgttcaacgatattgccgcgcagggttacccaggtgtcgtcacgcagggattttgcgctttctacagtcgttacgctgccgttcggcccctggaatcctccggcctgactttgcgttgcgcttgggccagaaaaaccgccctgctctgctgccatcaccggtgcgctgcacagggccattactgcgattactgctgcgaattttttcatgtttattactccctttaatgtctgtttccgagcatttaacaagatagtccttaacaacttcttaagggaaaaaaataaaatttagtgctgtacagagcgcgttacaacacggtttactggcagcaaatacggttatcgcagggatgaaaaaatgcgaattttactgatagaagatgacatgctgattggcgacggcatcaaaacgggccttagtaaaatgggttttagcgtcgactggtttacacaaggtcgtcagggaaaagaggcgctttatagcgcaccttatgatgcggtgatcctggatttaaccttaccaggcatggatggtcgcgatattttgcgcgaatggcgagaaaaaggtcagcgtgagccggtactgatcctgaccgcgcgcgatgcgctggcggaacgtgtagaagggctgcgtctgggagctgacgattatctgtgtaaaccttttgcgttgatagaagtcgccgccaggctggaagctctgatgcgccgaaccaacggccaggccagcaacgagctgcgccacggtaacgtcatgctcgaccccggcaaacgtatcgccacgctggctggcgaacccttaacactgaaaccaaaagaatttgccctgctggaattactgatgcgtaacgctggtcgggtactgagccgcaaactgattgaagagaaactgtatacctgggacgaagaggtcaccagtaatgccgttgaagtgcatgtgcatcatctgcgacgcaaactcggtagtgattttattcgtaccgtgcatggtattggttacacattaggtgagaaatgaaatttacccaacgtcttagtctgcgcgtcaggctgacgctaatctttttaattctggccagcgtgacctggctgctttccagctttgtcgcctggaaacaaacaacggataacgtcgatgaattgttcgacacccaactgatgctgtttgccaagcggttaagtacgctcgatctcaacgaaatcaacgcggcggatcgcatggcacagacgccaaatagattaaaacacggtcatgttgatgacgatgcgctgacctttgccatctttacccacgacggcagaatggtccttaatgatggcgataacggagaagatattccctatagctatcaacgggaaggttttgctgacgggcaactggtcggtgaagacgatccttggcgttttgtctggatgaccagtcctgatggcaaatatcgcatcgttgttggccaggaatgggaataccgtgaagacatggcgctggcgattgttgccgggcaattgatcccgtggctggtcgcactgccgattatgttaatcatcatgatggtactactgggtcgtgaactcgcgccgctgaacaaactggcgctggcactacgtatgcgtgaccctgacagcgaaaaaccactaaacgcgactggcgtacccagcgaagtgcggccactggttgagagcctaaatcaactgttcgcccgcacacatgcgatgatggttcgtgaacgacgctttacctccgacgcagctcacgaacttcgtagcccgttaacggcgctgaaagtgcaaaccgaagttgcgcagctctctgacgatgatccgcaggcgcggaaaaaagcactgctccaattacattccgggatcgatcgcgctactcgtctggttgatcaactgctcacgctaagccggctggacagtctggataaccttcaggacgtcgcggagatcccgcttgaagatctcctgcaaagcagcgtgatggatatttaccacacggcgcagcaggcgaaaattgacgtgcgactgacactcaatgcccacagcatcaaacgcaccgggcaaccgctattgctaagtttgttggtgcgaaatttgctggataacgccgtgcgctacagtccacagggcagcgtggtagacgtcacgctgaatgctgataatttcatcgtgagggataacggccccggtgtgacaccagaggcactggcgcgaattggcgaacgcttctatcgcccacccggacaaaccgctaccggcagcgggcttgggctaagcattgtccagcgaatcgccaaattgcatggcatgaatgttgaatttgggaatgcggaacaaggtggatttgaggcgaaggtaagctggtaacttctctgtctatgagagccgttaaaacgactctcatagattttattaatagcaaaatataaaccgtccccaaaaaagccaccaaccacaaaccagacaaataccgaggctgaatacatatacccaaaactcgaacatttcccgcataaagagttttcttaagataagaataataagtggcgtaagaagaaaaaatgctgcaatcattgcttgcaatatacgatcttcgccactaacggaaggtatactgcaaatatttcctccgctctcaagcatccagtcatacttattgaaagcaaaaaaagaatctattaaccaataagtaagcattatatatagcaatgcttcaaatattgttttaattttctgctttaacatatatcagtacgctcataaaaatccatttataattatcaacatgacacgttgatactttcatcttttacttattcaaagccatattttcaatccccaaaaaaaccgaaccaaacgtgtaaattattccggtgcgagtaagaattatgaggaatggctatcagtattgtcattttcagaaaatatttatcctgcatcggtgagtcagagtaagatcagacttttgctaaattcgcaaaagactttgcacattttgctaatttcaccgtaccgctctgtgacgtactatagtcggcaaacgtctcaccttgaggttaaaaaatgagcaacatcctgattatcaacggcgcgaaaaaattcgcccactccaatggtcaactgaacgacaccctgaccgaagtcgcggatggcacactgcgcgaccttgggcatgatgtccgcatcgttcgcgccgacagcgactacgatgtcaaagcggaagtacaaaactttctctgggctgatgtggtgatctggcagatgccaggctggtggatgggcgcgccgtggacagtgaaaaaatacattgatgatgtattcaccgaaggtcacgggacgctgtatgccagcgatggtcgtacccgcaaagatccgagcaaaaaatacggttccggcggcctggtacagggcaaaaaatatatgctttctctgacctggaacgcaccaatggaagccttcaccgaaaaagatcagttcttccacggcgttggcgttgacggtgtgtatctgccgttccataaagcaaaccaattcctcggtatggaaccgctgccgacatttatcgctaatgacgtgataaaaatgcctgatgttccccgctatactgaagaatatcgcaagcatcttgtggaaatttttggttaactagagctcaggctttagaaggagttaaccatgcttaccgtaatcgcagaaatccgtactcgtcctggtcaacatcaccgtcaggcggtattggatcagtttgctaaaatcgttccaaccgtactgaaagaagaaggttgccacggctatgcgccaatggtggattgcgcagctggcgtgagtttccagtctatggcaccggattctatcgtgatgattgagcagtgggaaagcatcgcgcatcttgaagcgcatctgcaaaccccgcacatgaaggcgtatagcgaagccgtaaaaggtgacgtgctggagatgaatatccgtattctgcagccagggatttaatcctgccttgtttgcccggccatcctgaccgggcaatgttctttcctttaaacctcaatctccgccatgtcgcctttctcttgcaaccagttgcggcgatcttcgctgcgtttcttcgccagcagcatatccatcatcgcgtcagtacgctgatcgtcttcatcatcgatagtcaactgcaccagacggcgagtgttcggatcaagcgtggtttcgcgcaattgcatcgggttcatttcccccagacctttaaaacgctggacgttcggcttgcctttcttgcgttttaattgctcaagtacgccctctttctcttcttccgtcagcgcgtaataaacctctttcccgagatcaatacggtagagcggtggcagtgcgacgtaaacgtgaccgtgtttcaccaacgcgcggaaatgttttacgaacaaagcgcagagcagcgtggcaatgtgcagaccatcagagtccgcatccgcgaggatacagattttgccataacgaagctggctcagatcgtcgctgtcaggatcgataccgatcgctacgctaatatcgtgcacttcctggctagccagcacttcgtcggaagagacttcccaggtgttaaggatcttacctttcagtggcatgatcgcctgatattcgcgatcgcgcgcctgcttggcagatccgcctgcggagtcaccttccacaaggaacagctcggtacggttaaggtcctgcgcggtacaatcagccagtttgccaggcaacgccgggccgctggtcagctttttacgcaccacttttttggccgcacgcatacggcgctgggcgctggaaatcgccatctccgccagcagttcagccgcctgaacgttctggttcagccacaggataaaggcatctttcaccacgccagaaacgaatgccgcgcattgacggctagagagacgctctttcgtctgcccggcaaactgcggatcctgcatttttacactcagcacataggcgcagcgatcccagatatcttccgcgctcagctttacaccgcgcggcagaatattgcggtattcacagaactcacgcatcgcgtccaacaggccctgacgcagaccattaacatgggtaccgccctgcatcgttgggataaggttgacgtagctttcggtcagcagttcaccgccttccggcagccacagtagcgcccagtccacagcttcagtatcaccagcgaaattaccgataaacggtttttccggcagcgtcggcagaccatttaccgcttccgccaggtaatcattcagaccgtcctgatagcaccagcgttgttcggtattgttgatctcatctttaaaagtgatctcaacgccagggcacaataccgctttggctttcagcacatgcgtcaggcgactaacagaaaatcgcgggctgtcaaagaaggtttcatccggccagaagtgcacactggtaccagtattgcgtttaccgcaagtgccgacaacctgtaaatcctgcaccttttcgccattttcaaaggcgatgttataaacctgaccatcgcggcgcacgttaacttctacgcgcttgctcagggcgttaaccacgctaatccccacgccatgcaggccgccagagaactggtaatttttgttagagaatttaccgcctgcatgcagacggcaaagaatcagttcaaccgccggtacaccctcttccgggtgaatatccaccggcatcccgcgcccatcgtcaataacttctaagctctggtcagcatgtaaaataacgtccacgcgttttgcgtgacccgccagtgcttcatccacactgttatcaatgacttcttgccccaaatggttagggcgagtggtatcggtatacatccccggacggcggcgaaccggctcaagcccggtgagtacctcaatggcatcagcgttataagtttgcgtcatggtttaagttagtaattcgagttgatcgtcagagatggtgcagaccaagaaaatcgacgatcgggttgaaataatcttcgaagcccgtgaatgcgtggttgccgccttctatgacagtctggcggcaggaagcgtagtacgccaccgcctggcggtaatccagcacttcatctcccgtctgttgcagcagccagatcaaatccggcgcttccagcgggtcaatctgcatgactttaagatcgtaaatatggcgactctctagcacatattgctgcccggtgtaggggttctcgttctgaccgagatagtccgtcagcagttcaaacgggcgcaccgccgggtttaccaccactgcgggcagcataaaacattgactcaaccaggtggcgtaatatccccccagactgctaccgacaatacccaggctatcaccgccatgttccaggacaatggattccagcagctctgccgcgtcggaaggatacggcggcaactgcggaatgatcatctcaacgtcagggtgatgttccgccagccagttttttaacaagctcgcttttgcagagcgcgggctgctgttgaaaccgtgtaaataaagaagcgtagacatcagtagccttcactagcggtatcaggttggaaacgtgtgtccgccaggcgatgcacctcggtggtcagcgtgccatcagcatgtaactcgagagtacgccagccgggcgcgatggtatccagcgtaaagttggaacagtgcggcttaaactgcacacaggtgctcggcgttgccagcaggcggcgaccattccagtcgagatccagctcctgatgaatatgaccgcacagcaagtatttgacgtgcggaaacttcgccagcacggtatccagttcgcccgcgttacgcagactgtgttgatcgagccaactacaacccgcaggtagcggatgatgatgcagcagcagcaacgtatggcgttctggcgcatcggccagtttacgttccagccactcaagctgaaactcgctcagctcaccgtgcggcacgccaaacacctggctatccagcaacaggatttgccattgctcaccaataaacacgcgcttcgccggggagatacccgcatcctgtaacgcgctgtacatcgcgggctggaaatcgtggttgcccggcagccagacgcagggcgcacgaaaacttgcgatgccttcagcgaaatgctgataggccgcagaggattgatcctgcgctaaatcacctgtcgcgacaatcaggtcgaattcgtgctggtgtggccgaatcgcctccagcaccgcctggtaactctcccaggtgtttacccctaacagggcttcgtgcttttgtgcaaacaggtgagtgtcggtaatttgtaaaatcctgactctggcctcaccagccagaggaagggttaacaggctttccaaatggtgtccttaggtttcacgacgttaataaaccggaatcgccatcgctccatgtgctaaacagtatcgcaaccagtccgctaaaaactgattaatttgatgcttttcgtcgcgttgatgcaactttttattaggataatcataccgcgctttgaagcgaaaaatctgctggctactacacacttcagccaccatcgcgtcatgatacagacgcaccgtcatactcggaaggctccagtaactgatcgcgggcgcagtctgttctattgtcaccagggtagtgtatcgggtgctttccacaatcgtcagccgatattgtgcgtttgccacctgatagcttacagtttcgccgggtgcgtcattgcgcggtaacaaacggcgcaattgactaaagttcatctcgcacaggcgcatcatttcaggaaagtcaggtgtgtaacgcttcatttatgcccactcattttttaacgcttgatgatgcagctgcagccattgcaaagcgatgacgctcgctgcgttgtcgattttcccctcttctacccactggtatgcctgttcccggcttaccacatgaacgcgaatatcttcgttttcatcagccagaccgtgaataccgcttgcggtcgtggcgtccacttcgcccaccataatactgctacgctcactggtgccccccgggcttgccaggaaacttaacaccggtttggtccgtttgactatcagtcccgcctcttcaatcgcttcgcgacgggcaacatcttccacactttcaccctcttcaatcatcccggcaaccatctccagtagccaaggggtttcgctggtgtcgtacgcggcaatccgaatctgctcaatcagcacaacttcatcacgcactgggtcaaagggtagcaagactgcggcgtgaccgcgctcaaaaatttcccgccgcacctcatgactcatttgcccgttgaatagacgatgacgaaatctataaagatctaaactaaaaaagccgcgataaagtgtttctcgtgcaataatttctacatcgtttttgccaaatgtaacgggcaggttgtctggcttaagcattgttaatgtcctggcactaatagtgaattaaatgtgaatttcagcgacgtttgactgccgtttgagcagtcatgtgttaaattgaggcacattaacgccctatggcacgtaacgccaaccttttgcggtagcggcttctgctagaatccgcaataattttacagtttgatcgcgctaaatactgcttcaccacaaggaatgcaaatgaagaaattgctccccattcttatcggcctgagcctttctgggttcagtagcttgagccaggccgagaacctgatgcaagtttatcagcaagcacgccttagtaacccggaattgcgtaagtctgccgccgatcgtgatgctgcctttgaaaaaattaatgaagcgcgcagtccattactgccacagctaggtttaggtgcagattacacctatagcaacggctaccgcgacgcgaacggcatcaactctaacgcgaccagtgcgtccttgcagttaactcaatccatttttgatatgagcaaatggcgtgcgttaacgctgcaggaaaaagcagcagggattcaggacgtcacgtatcagaccgatcagcaaaccttgatcctcaacaccgcgaccgcttatttcaacgtgttgaatgctattgacgttctttcctatacacaggcacaaaaagaagcgatctaccgtcaattagatcaaaccacccaacgttttaacgtgggcctggtagcgatcaccgacgtgcagaacgcccgcgcacagtacgataccgtgctggcgaacgaagtgaccgcacgtaataaccttgataacgcggtagagcagctgcgccagatcaccggtaactactatccggaactggctgcgctgaatgtcgaaaactttaaaaccgacaaaccacagccggttaacgcgctgctgaaagaagccgaaaaacgcaacctgagcctgttacaggcacgcttgagccaggacctggcgcgcgagcaaattcgccaggcgcaggatggtcacttaccgactctggatttaacggcttctaccgggatttctgacacctcttatagcggtagcaaaacccgtggtgccgctggtacccagtatgacgatagcaatatgggccagaacaaagttggcctgagcttcagcctgccgatttatcagggcggaatggttaacagccaggtgaaacaggcacagtacaactttgtcggtgccagcgagcaactggaaagtgcccatcgtagcgtcgtgcagaccgtgcgttcctccttcaacaacattaatgcatctatcagtagcattaacgcctacaaacaagccgtagtttccgctcaaagcagtttagacgcgatggaagcgggctacagcgtcggtacgcgtaccattgttgatgtgttggatgcgaccaccacgttgtacaacgccaagcaagagctggcgaatgcgcgttataactacctgattaatcagctgaatattaagagtgctctgggtacgttgaacgagcaggatctgctggcactgaacaatgcgctgagcaaaccggtttccactaatccggaaaacgttgcaccgcaaacgccggaacagaatgctattgctgatggttatgcgcctgatagcccggcaccagtcgttcagcaaacatccgcacgcactaccaccagtaacggtcataaccctttccgtaactgatgacgacgacggggcttcggccccgtctgaacgtaaggcaacgtaaagatacgggttatctgccgcattcttcccccttcagccttcaatttcgaccagccatcctctattctgatgggtatttaccactggtcccggaagacaaaaatgaaacggacaaaatccatacgccacgcatcgttccgcaaaaactggagcgcacgccatctgacaccagtcgctctcgcggttgccactgtttttatgctggctggctgtgaaaagagtgatgaaacagtgtctctctatcaaaatgctgacgactgtagtgctgcaaacccaggcaaaagcgccgaatgtaccaccgcgtacaacaatgcgctgaaagaagccgaacgtactgcgccgaaatacgccacccgtgaagactgtgttgctgaatttggtgaaggtcagtgccagcaggcaccagcccaggctggcatggcaccagaaaaccaggcgcaggcccagcaatccagcgggagtttctggatgccgctgatggccggttacatgatggggcgtctgatgggcggcggcgcgggatttgcacagcagccgctgttctccagcaaaaacccagccagtccggcttacggtaaatataccgacgcgacgggtaaaaactatggcgcagcccagccaggccgcaccatgaccgtaccgaagacggcaatggcaccaaaaccggcgaccaccactaccgttacccgtggcggttttggtgaatctgttgccaaacaaagcactatgcagcgtagtgcaaccggtacctcttctcgtagtatgggtggctgataccgatggaaagagtcagtattaccgagcgcccggactggcgtgagaaagcccacgaatacggtttcaattttcacaccatgtacggcgagccgtactggtgtgaagatgcttactacaagttgaccctcgcccaggttgaaaagctggaagaagtcaccgccgaactgcaccagatgtgcctgaaagtggtggaaaaagtgatcgccagcgatgagctgatgaccaaattccgcattccaaaacacacctggagttttgtgcgccagagttggctgacgcaccagccaagcctttatagccgtcttgatctggcgtgggatggcactggtgaacctaaacttctggaaaataacgccgatacgccaacgagtctatacgaggcggcgttctttcagtggatctggctggaagatcagcttaacgccggtaacttgccggagggcagcgaccagtttaacagtctgcaagaaaaactgatcgatcgcttcgttgagctgcgtgaacagtatggcttccagttgctgcatctcacctgctgtcgcgacacggtggaagatcgcggaaccattcagtatttgcaggactgcgcaacggaagctgaaattgctactgagttcctctacatcgatgatatcgggttaggtgaaaaaggtcagttcacggatttacaggatcaggtaatttccaacctgttcaaactgtatccgtgggaatttatgttgcgtgagatgttcagtaccaagctggaggatgcaggcgtacgctggctggaaccggcgtggaagagcattatctccaacaaggcacttctaccgctactgtgggagatgttcccgaatcacccgaacctgctgcccgcttattttgcggaagatgatcatccgcaaatggaaaaatatgtggttaaaccgatcttctcccgtgaaggcgcaaacgtgagcatcattgagaacggcaaaaccattgaagcagcggaaggtccgtatggcgaagaagggatgattgttcagcaattccacccgttaccgaaattcggcgacagctatatgctgattggtagctggctggtgaacgatcaacccgccggaattggcattcgtgaagaccgtgcattgatcacccaggatatgtctcggttttatccacatatttttgttgaataagccacgataccggatggcactcgccatccggtaattgttagcctatctgcacgctcagcatactcaggctgcccatttctataccctcaaccggaatggtaattggctcctgcccatcccacgcacctaacacatacaacaacggcaaataatgctctggcgttgggttgcttaacgtgccaccttcatggtcgaggtaattcaccagaggatgttgttccactggcccttgccacgtcagattcgctttcacatactcattaaagctcgtcgcccacggatacggactactatcaccgtgccacttcactgtgcgcaggttatgcaccacgttaccgctggcgaccaacattattccttcatctcgcagcgctgccagtttgcgccccatttcgaaatgccaggcggcaggtttgctactgtcgatactcaactgcaccatcgggatatcagcgtcaggatacatcttaatcagcacgccccagctgccgtggtcaaagccccaggcttctttatccagcgtcaccgggatcggcgctaacagctcaaccagacgctgtgccagcgcagggctacccggagcaggataatgcgtatcgtacagcgcctgcgggaagccaccaaagtcatgaatcgtgggcggcgtctccatcgcggtcactcctgttccacgggtaaaccagtgagcgctaaccaccacaatcgcttgcgggcgtggcaatgtcatccccaacttctgccagctgcgggtatacaaattatcttccagcacgttcatcggactaccgtgacctaaaaacaatgctggcatacgtgtactagacatgatgatatccttaactaaaggtgtcattttgatatcctcacaatacgcttgttcggcggagtaagaacccggataacaatgatgatgatcatcagttattttgacgatctgcctgaaggtgaagatttataaggagttgtcgatgagtgtacctctcattctgaccatactggcgggggcagccacgtttattggcgcgtttctcggcgttctcgggcaaaaacccagcaaccgcttactggcgtttagcctaggttttgcggcggggatcatgttgctcatcagtttaatggaaatgcttcctgccgcactagcagctgaaggaatgagccctgtgttgggttatggaatgtttatcttcggtctgcttggctattttggcctggaccgcatgttgccacatgctcatccgcaggatttaatgcaaaaaagcgtgcagccgttgccaaaaagcatcaagcgcacagccattctgctcactctcggcatcagtctgcataacttcccggaagggattgccacctttgtcacggcgagcagcaacctggagctgggatttggcatcgcactggccgtcgcgttgcacaatatccctgaaggtctggcagtggcaggcccggtttatgcggcaacggggtctaaacgcaccgcgattctgtgggcggggatttctggactagcagaaattcttggtggtgtgctggcgtggttaatcctcggtagcatgatttccccggtggtcatggcggcaatcatggcggcggttgcaggaattatggtggcgctcagcgttgatgaattaatgccgctcgccaaagagattgaccctaataataaccccagctatggcgtactatgtggaatgagtgtgatgggattcagtttagtgctgctacaaacggcgggaattggttaaaaacaacatcagaagttgtccagcgcatggacaacttctgccagcttcacgaaagccttattctaccttttcggctgtctcttctctcgtactgtttaagtatttgttccgcgcttcaagcagtgcgtctctgtcctggcgaaacgcccgacaataacgtttcaaatgcaggaaataacccaccacaaccagagcaatcaatacaatccagtaccaggcgataaacatccttttacccttaatatttaacaatactaaacatttagcgtataaatttcacatatcctttttcggatatattcatatggtcgcataataacggaacaattatatgattttgatcataatgaaaaagaatgcctgatattaatgaaattttctcatagaaagagaagcggaattaacatcttgcatagcagggaaaaataaaaaccgaagcctgctacaacttcggtttcttgattaaggcagtaaattaagcagcggttttcagctggctttacgctcatgtgcctgacggtatgccaccaggtcttcaatagtcacgagcgccatattgtgtttattggcaaactcaatacactctggtgcacgcgccatcgtgccatcgtcattagtcagctcacacagtacaccagccggtttaaagcctgccagcgtcatcagatcaatagttgcttcagtatgaccgccacgcgtcagtacaccacctgcctgagcgcgaagtgggaaaacgtggccaggacgattcagatcactcggttttgcgccatcggcaatcgctgcgcgaacggtcgtaatacggtcagcggcagaaacaccggtagtcacaccttcagctgcttcaatggtcacggtaaaaccggtgccataggcgctggtgttattttctaccatcattggcagatcgagttgtttacggcgatcttcagtaatgcacaggcaaacaataccgctaccgtggcgaatggtcagcgccatctgctcaacagtcatggtttctgccgggaagatcatatcaccttcgttttcacggtcttcatcatcaagcaccattacaccgcgtccttcacgcagcgcagccagtgcattttcaacacgttcgaaaggcgtaccaaaagaggaaagtagcgtctgattcatggtaaaaaaacctcactaaaattatggttaccagaatcagggcagtcttaggagtggcggcatatagccaaaataacgtgagcgggtccatgcccgacagaatcgttactctctcccatccggactctaaccgtcggccccggaattacaccggatctgctgtcctttgagttcgcacccaaagcgctcgcgggctttcaactgagttgatttaccgccggtggggaatttcgccccgccctgagaataagcggattcactataacgctaatgattagcggcagcaacgcatagcttcacataattctggtttatatctaatacaaacactaaaacgggccatcaggcccgttatatcagtgctctaactccagctctcttgcctgcatcatctgttgacaataccaggcataacgtgcgcaaaaccaggttctatgttcttcatccatgttaccagtaacggccagaatatcgaccgggcgaccttctgcgtgcattctggcaaaactacgcgccaggaaatcgaaattatttaaagaattaagactatgatccataagcacatcctccggttatcgcataccttttaaggccatatgctttttctgatttcagtattccccaatcagtgtagtgcctttaaacataacgtgcgtaaatatattgtccccgatcacactttttagtgaaaaataaaaaaccatattaaaagactttctcttccagaacttctctaacctgtgttattattaacacagataaatgtaagcaaggaaactattacaaagtaaatattgcgtcactaaatggacattggagtgatatatgattttattcgccgactataacaccccttatcttttcgctatttcctttgtactgttgatcggcctgttagaaatttttgcgcttatctgcggtcacatgctctccggtgctcttgatgcacatcttgaccattatgattctataaccacaggtcatattagccaggcacttcattatctcaatattggaagattgccagctctcgtcgttctctgcttactggctggtttttttggtcttattggcatcctgttgcagcatgcctgcatcatggtctggcaaagtccactgagcaacctgttcgtggttcctgtcagtttactgtttacgattattgcggtgcattataccggtaaaatagttgcgccctggattccacgcgaccatagtagtgctattacagaagaagaatatattggtagcatggcgttaattaccggtcatcaagccactagtggtaatccctgcgaaggaaaactcaccgatcaatttggccaaatacattatttactactggagcctgaagaaggaaaaattttcactaaaggagacaaagtgttaattatttgccgactttctgcaacgcgatatttggcggaaaataatccctggccccaaatattgtaatttattaatcaaaaggaaatttaataatggatgatattgttaattctgtgccctcctggatgtttaccgcaattattgccgtatgcattctgtttattattggaattattttcgccaggctctatcgtcgcgctagcgcagagcaagcttttgttcgtactggtttaggtgggcaaaaagtggtaatgagcggtggcgcaatcgtgatgccgatctttcatgaaataatccccatcaatatgaatactctgaagctggaagtcagccgcagtaccattgatagcctgattacgaaagatcgtatgcgcgtcgatgtagtagtcgctttctttgtgcgggtaaaacctagtgtagaagggattgccaccgctgcccagacgctggggcaacgcaccctgagccctgaagacttacgtatgttggttgaagataaatttgtcgatgccctccgtgcaacagctgcgcaaatgaccatgcatgagttacaggatacccgcgagaactttgtgcagggggtgcaaaatacagtggcagaagacctgagcaaaaacggtctggaactggagagcgttagtcttaccaactttaaccagaccagcaaagaacatttcaatccgaacaatgcctttgacgccgaaggtttaaccaaactgactcaggaaacagagcgccgtcgccgcgaacgtaacgaagttgaacaggatgtagaagttgcggtgcgtgaaaaaaatcgcgatgcgctaagccgcaagctggagattgaacagcaagaagcgtttatgacgcttgagcaggagcagcaggttaaaacccgtactgccgaacagaatgcacgtattgcggcttttgaagctgaacgtcgtcgtgaagcagagcagacacgaattctggctgaacgacagattcaggaaacagaaatcgaccgcgaacaggccgtccgcagtagaaaggttgaagctgaacgtgaagttcgcattaaagagatcgaacagcagcaggtcaccgaaatcgctaaccagacgaaaagcatcgctattgccgccaaaagcgaacaacagtcccaggcagaagcgcgtgctaatctcgcacttgcagaagcggtaagcgcccaacaaaacgtagaaaccactcgccagactgccgaagccgatcgtgctaaacaagttgccctaatcgctgccgcgcaggatgcagaaaccaaagcggttgaactgaccgtgcgggcgaaagcagaaaaagaagccgcagagatgcaggcggcggctatcgttgagttagccgaagctacacgtaaaaagggtctggcggaagcagaagcacaacgtgcgctgaacgatgctatcaacgtactttctgatgaacaaaccagccttaaattcaaactggccttgttgcaggcgctgcctgcggtaatagagaaatccgttgagccgatgaagagtatcgacggtatcaagattattcaggtcgatggtctgaatcgtggcggcgctgcgggtgatgcaaacacgggtaatgtggggggcggaaacctggcggaacaagcattaagtgccgctctctcttaccgcacacaggcaccgctgattgactccttgctcaatgaaattggcgttagtggcggcagtctggcggcattgactagtcccttaaccagtacaactcccgtcgaagaaaaagcagagtaaaccctcttccaggaataatccctggcccaaaaagccggggattttttatatctgcgttccgctaaaaagtgcaaatgatcaggttgttgcagcattttgcgtgacggctcggggaaggcaaaactgcatcagagaaagcattgcgtggggtctggcgctcatcaacaatcggggagtcagcagggggctgaaacgggaaagcccctcccgaagaagggggccttacagaaggaaagggttatgatgaagctcgtcatcatactgattgtgttgttactcgtaagtttcgcagcttattaacagccaatcagaggggggagaaatcctccctcacccttgttcctttactttaggttgaaaaaaaatcagcgtcaagaaggtttcattaacacatatccctggcccaaaaagccggggattttttatatctgcgttccgctaaaaggtgcaaatgctcaggacgttgcagcgttttgcgtgaccgctcggggaaggcaaaattgcctctgggaaagcattgcgcggggtccggcgctcatcaacaatcggggggcagcaaggggctgaaacgggaaagcccctcccgaagaaggggccttgtataaggaaagggttatgatgaagctcgtcatcatactggttgtgttgttactgttaagtttcccgacttactaacaactcatcagaggggggagaaatcctcccttacccttgttcctttactctaggttgaaaaaacaacagcgtcaataggcctgccatgtacgaagcgagatctgtgaaccgctttccggttagccttttttatcctgttggatcttcttgatgatgttggtcgtgctgcaaccgtcttcaaagttgagcaccaacacttcgccaccgttggcccagacttctttactcccggcaatctcttctggtttatagtcgccgcctttcaccagcagatctggcaagatcccggcgatcaagcgctgcggcgtgtcctcttcaaagctcactacccagtcgaccgcttccagtgcgcccagcacaatcatacgctgttcgagtgggtttaccgggcgggaatcccctttcagccgtttggtggaggcatcgctgttgacggcaacaatcaagcggtcacccagcttgcgggcatttgccagataagagacgtgcccggcgtgcaggatgtcaaagacaccgttggtcatcaccactttttcaccacgtttacgcgctgccgctacggccagcttcagttcctcttcggtcatcacgccaaagcctgtatctgcacgtccacgtacagcattttccagctcgatcgggctaaccgtggaggttcccagtttgccgaccaccacgccagccgccgcattggcaaagaagcaggcttcttccaggctattacccgctgccagcgttgccgccaggacgccaatcaccgtgtcgcccgcaccggtaacgtcatacacttcctgcgcttgggttggcatatgcagcggcgctttacccggttgcagcaggctcataccctgttcggaacgggtcactaacagagcgctgagttcgtaatcggcaatcagtttcatgccgcgctcaacaatctcttcttcggtcttacatttaccgacaacagcttcaaattcgctgagattcggcgttaacagcgtagcgccgcggtagcgctcaaaatcggtaccttttggatcaatcagcaccggaacacccgctttacgcgccagttggatcatctgctgtacgcttgccagcgcacctttggcgtagtcagaaagcaccagcgcgccaatgctactcagcgcctgattaatccgctcgtgcagcggctgcggatcaacaccttcgaaaccttcttcaaaatccagacggatcagctgttggttgcgggaaagtacccgtaatttggtaatggtcggatgcgtcggtacagaaacgaagtcgcatttgacgttgacgtcggccagagatttactcagcgcgcgcgctgcatcgtcaatgcccgtcaacccgaccaggcgtgcattagcaccgagagaagcgatattcatcgccacgttagccgcgccgcccggacgttcttcgatggtattcactttaaccacgggcaccggcgcttccgggctgatacgactggtggggccgtaccagtaacgatccagcatcacatcaccaaccaccatcactcctgcacgttcaaactctggcagcgttactttcattcctgtctcctgagagattcaaaatttgcgcgcgataataccatacttcattcttccaccagccacttctgccagcttgcccgcaccagttcacgctctgcggtgaagcaatcctcgctcacatggcccggcaattcctgtaatgccagatgatgaagttcatcgcgaagcgtagtgtaagcacgggtcagcgccatcgcttcctgctcttccataatgtcgttttgcgccagtagttccagaatacgcacgttgtcactccagcgcgttaacttcggtttttcatgagcgtagcgcaacaccagatattgggtaataaattcgatatcggtaattcccccttcatcagctttgatatcaaagcgatcgcgatgtttattgccgagatgagcgcgcattttctcgcgcatttcccgcacttccgtttgcagagttttaccttcacgcggcagcgtcataatctcgcgacgcactgcgtcaaagtgcgcggtgagctgcggatcgccgtacactacacgcgcacgcaccagcgcctgatgttcccacgtccaggcctcgtttttctgataatcggcaaatgcttctgcggatgtcaccagcattcccgccgccccggacggacgcagtcgagcatccacttcatacaaaatgccggaagaggtacgcgtactgaacagatgcataatgcgttgcgccagacgcagataaaactgccgcccgtcgatttcccgctcaccgtcagtcatcgcatccattgggcaatcatggaggaagataaggtcaagatcggaactgtagcctaactcccagccgcccagcttgccgtagccgaccaccgcaaaaccacgcccttcgcgttcgttcaggtgattcggcttaccgtagcgggcaaccatttgaacccacgcctgctgaacgacggcatctatcatggcttccgccagccaggttaagtgatcgctcactttcatcaccggtagcgtaccggcgatatccgctgcggcgatgcgtaacagctgcgcctgtttgaactgacgcagcgcctcaagctgttgctcttcgtcatcttccggcacgcgcagcaaatactggcgcaactcatcgcggtaggcatcggtcgccgtcggctggtaaagggtgtttggatcgagcaattcatccagcaataatggataacgcgccagctggctggcaatcatcgggctcgcggcacacagagaaatcaaatgtttaagcgccgcggggaattcactgagcaattctaaataggtggtgcgggtaacaatccccaccagcaaggcggtaatgcggctcagcgtaacggcagcgtcttcacgcgcacagacatcacttagcagatgcggcatcagatggtcgagcacctgacgtcctcgcggcccgatggtgcgcttatccagctctttgcggaaatcggcaatcagcgttagcacctgtttgcgatcatcctcgctaagatgcgccagcactggcgtagtgtcatcttcctgcaacgcatcctgccacagctcacgccactgttcgctcaggctctcttcctgagtttcactttcatcgtcgccaatcaattcattaaacacccggcgcacattggtcatatgtgcggtcagcgccccggtcagttgcggccagtcagcaaagtccatcgcccacgccagccgcgcacgattaagctcatcagaaggaagcgtctgggtttgttcgtcgttaatgctttgcagcaggttttccagacgccgcaggaacagatacgccactcgcaattgttcagcatcgttttcagaaagcagatgcagctcggcaatggcgctgagcgttggcagtaaagagcggctttgcaggctcggttcgcgtccgccgcgaatgagctggaacacctgaacgataaattcaatttcgcgaatgccgcctgcgccgagtttgatattgtcggtcaaaccacgtcgacgcacttcacgggcaatcatccctttcatgttgcgcaggctctgaatcacgctgaaatcgatgtaacgacggaaaacaaacgggcgcagcatcgcacgcaactcgttagcatagacgccttcgctatcgcccataatccgcgccttgaccatcgcgtaacgctcccagtcgcgcccctgctcctggtaataatcttccaacgcggcaaagctcagcaccagcgggccactttcgccaaacggacgcagccgcatatccacgcgatagacgaagccatcctgcgttggttgatccagcactttaatcagccgctgccccatgcgggtaaaaaactgcgcgttatccagttcccggcgtccaccctgcgtacaaccatgttccggccaggcaaaaatcagatcgatatcagaggagaaattcagctccccaccgcccagcttacccatgcctaaaatcagcagcggttgcgcttcgccctgcgcattgcacggcgttccccactcgcggcagcaggcgtcatacagccagtcacgcgccgcaacaatcagcgtctccgccagatagctgagctgctgcaatatgctctcttcagtaaccagtgccagcgtttgcgcccaggcgatgcgcaccataatgcgccgccggaatagccgcagctcgcgcattaacccggcttcgtcactcacattacagagcgcctcctgcaaccatgccgcgtaatgctgccattcgtcggcctgcggcggttggctttccagttccgtcagccactctggatgcgcaatcacgctgtcctgcacaaaatcactaaaagtaagtacactcttcgcctgtgcgctaagactttcctcggctaaaggctctggcagccgctcaacaacggtctgccagtactgctgtaacggactagagagcggcttcataagcgattttatccttgcctgattaacgttttccgctgtgcaaccagaacggttcctgattgtttgcctcattacggaaatgttcaatttcgatgcgttgcccggtcgcaatagcgtgatgcagcccctgccagttctccagccaggcttgcgcgacgacaggatcatagtaacccgccagcaacagtatactgtcaatatcacgcgtcaggcgtggcaactggtcacggtagcgatcgcctaacggctggcagaaaacgcttttcagttcagcggcatggcgggaaagatggatatcggcaaagcgtttgaaggagtcgctgattttgccctgcgctttggcatctaaaaatggctgccatgctttgcttaccaaccattcggtcaacgccagcttcgccattgccgtttcggtagagtagaccgccgtcacggcagacaccgcagaagcaatggtcgcctcgcattgagtcagcagatcacgtaagtgagtgctcgctttacgcggcacaataccaccgaacagcatcagcgtatgacggaccaggctaatggctgccagcacctgttctttcgccgcatcgttgccgcgtacccacagttcttcatgatactgccattgcgctaacgccagctcgagcgccgcttccagcccctgttccacatcggcttttgccgcaacatgcaaaatggtggtcggtttgatttcacgcgccggattgccctgcgccagatgatagccacgcgccgctttgctcaggctgccctggcgtaatccggtttggcttaccagttggttcgccagtttcagcaccgcgcgcgtgtcgccgctaagcagttccagttccagctcacagataggttcagcaaattcacccgctttcacttccccctggtcgagggcgatttcaatttggctaccatcgaccgccaccagccatttttcgcgataaaaatcggtgctgaacagcggctgcacgcgggaggcgagatcggcgggcaattcgccgttcggccagacttccgtcggtaactgcgccaggtcgagcgtcggttcgctcaacgccacgttatattccgggcgctgatgtaagccgcctgtcactcttcctgcaactttcatggtcatctcatagcgaccgttttcgccacgaatacgtaagcccatatcgtgcccacgcagccagttatccggcgtttcgtagtaaatattcagcaactgcacggggtcatggtgctcgccgcccagcgtattgagatggtcacgcaacgcctcaacggcactgtgattaacaataaactttaattcgatttcctgagccatggcctttacttatcggttatgtcacataagtgacgatgaacggcgaacttaatgcgatcttttttgtcagtagatagtattttgcgccaaattgccatgcaacgggcaatttgacgggcgtaaaagtttgaagcagtggcaagacctgacacagaggattccgattgatgtcgaatgctttgcgtagcgacactgatgccactactatcgttccactttccatgacaataacgacagcctgatgccaaaattacgcctgatcggattaactttactcgcacttagcgcgactgccgtcagtcacgctgaagaaacgcgctatgtttccgacgaactgaatacctgggtccgcagcggtccgggagatcattatcgcctcgtgggcacggttaacgccggcgaggaagtgaccttattacaaactgacgccaacaccaattatgcccaggtgaaagacagctctggccgtaccgcctggatcccgttgaaacaacttagcactgagccaagcctgcgctcccgtgtgccagatctggaaaatcaggtcaaaaccctgaccgataaactcaccaatatcgataacacctggaatcagcgcaccgcagaaatgcagcaaaaagtggcgcagagcgacagcgtgatcaacgggttaaaagaagaaaatcagaaactgaaaaacgagctgattgtcgcgcagaaaaaggtcgatgccgccagcgtacagctggatgacaaacagcgcaccatcatcatgcaatggtttatgtatggcggtggcgtgctggggcttggcttgctgctcggtctggtactgccgcacctgatcccaagccgcaaacgcaaagatcgctggatgaactaaatcgccttcttcgttgcactgtcttattattaggaattgtgtatttgacgaagggatgatggcgtgaagatttatctggtcggtggtgctgttcgggatgcattgttagggctaccggtcaaagacagagattgggtggtggtcggcagtacgccacaggagatgctcgacgcgggctaccagcaggtaggccgcgattttcctgtgtttctgcatccgcaaacgcatgaagagtatgcgctggcacgtaccgaacggaaatccggttccggttacaccggttttacttgctatgccgcaccggatgtcacgctggaagatgatcttaagcgtcgcgatctgaccattaatgcgctggcccaggacgataacggcgagattatcgacccgtacaacggtctgggcgatctgcaaaatcgtctgttgcgccatgtttcccccgcttttggcgaagatccgttacgcgtattgcgcgtggcgcgttttgctgcgcgttatgcccacctcggttttcgtattgccgatgaaactctggcgttgatgcgcgagatgacccatgcgggtgaactggaacacctgacgcctgaacgggtatggaaagagacggaaagcgccctcaccacccgcaatccacaggtgttcttccaggtactgcgcgattgcggcgcactgcgcgttttattcccggaaattgacgcactgtttggcgttccggcccctgccaagtggcatccggaaatcgatacgggtattcataccttaatgacgctcagtatggcggcgatgctgagtccgcaggtcgatgtccgtttcgcaactttatgccacgatctcggtaaagggctgacgccgccagaactctggccgcgtcatcatggtcatggcccggcgggtgttaagttagtggaacaactatgccagcgtctgcgcgtgccaaatgaaattcgcgatttagccagactggtggctgagtttcacgatctcatccacaccttcccaatgctgaacccaaaaaccatcgtcaaattatttgattccatcgatgcctggcgtaaaccgcagcgtgtcgagcaactggcgctgaccagcgaggctgacgtgcgcggcagaaccggttttgaaagtgcggactacccgcaaggccgctggttgcgcgaagcctgggaagtggcgcagagtgtgccgacaaaagccgtcgttgaagcgggatttaaaggtgtggagattcgcgaggagctgacccgacggcggattgcggcggtagccagctggaaggaacaacgttgcccaaagcctgaatgagtattgggcattttgccggatgcggcgtaaacgccttatccggctacatgtcaacgacagttgtaggcctgataagacgcgcaagcgtcgcatcaggcgttgattgccggatgcggcgtgaacgccttattcggcctacgcaatcgttgacaacgccaagcatccgacactattcctcaattaaaagaacacgacatacaccgcagccgccacaataaagcgataaatggcgaacgggataaagctaatgcgcttaatcaattgcaggaaggttttaatcgctatcagcgccaccacaaaagcggtgataaacccaacggcaaacatcgggatatcgccgcttgtcaggaagccccagcttttgtagagatcgagcgccgttgcgcccatcatcatcggcaccgccagcaggaagctaaactcggaagcagcgtaacggctcacccccatcagcatcccaccactaatggtcgccccggaacgggagaaacccggccacagcgccagacactggaaacagccaatcataaatgcctgacgataggtcatatcatcaagacccggcgcacgcggctctttcggcttcaggcattcggcggcaatcagcaacaaaccgccaacgaccagcgcatacatcacatttatcgggttaaacaaactcttaatcgtgtcgtggaacaacagccccaataccaccgccggaatcatccccagcaaaatgtggatcagcgttaaacgacctttgctttcaccttcgtgctgcaacgggcggccaaagtggatgccaatcaggccaaacagacgccgccagaacatcactactaccgccagaatacttcctaactggatcacaacttcaaaggttttcgccgtgtcgccctcaaaccccaacaagtgaccgacaataatcatatggcccgtgctggataccggcagaaattctgtcaatccttcgaccacacccaatattgccgctatcagcaggctgtgcatatcgctcatcaataaacccctaaattattaaaatgtaccgcttgtccgaactactgcgtatgaccaggttataaccgtttggtttaacagctgtaaaattaattattttctttcagattattgccacgctcaatgattacgccaacattcgccgcccgcgccactgcgcctggcttgctgagtttgatacgcacccacgggctgttgaagcgtgctaacagcagctccgccacctcttcagccacgcgttccaccagcgcaaaacgcgccccctcgacgtggctgaccaccgtttctgcaatgtcagcgtaactgaggcaatccgccacatcatcacttttcgccgctttacggttatcccacgccatttcgatatcgaacactaacttctgttcgatggtctgttcccagtcgtaaacaccaatagtggtgattacgctaagttgctctataaatacaatatccatcacgtcctgcctgctttttggctaaccggataccacttccggcgaaatgtgcgtattatccacagattcatcgttgaacacgaattttcaaaacggaacagcttatgagtgcaatcgcgcctggaatgatcctcatcgcgtacctctgcggctccatttccagtgccattctggtttgccgcttgtgtgggctgcccgatccgcgaaccagcggctccggcaatccaggcgcaaccaatgtgttacgtatcggtggcaagggagcagccgtagcagtactgattttcgacgttctgaaaggaatgttgcccgtctggggcgcgtatgaattaggtgtcagccccttctggctaggcttaattgccatcgccgcctgtcttggacacatctggcccgttttcttcggatttaaaggaggaaaaggcgttgctaccgcttttggtgccatcgcacccattggctgggatctcaccggagtaatggcgggaacctggttactgaccgtgctattgagcggatacagcagcctgggagcgattgtcagtgcactgattgctccgttttatgtctggtggtttaagccacaattcaccttcccggttagcatgctctcttgcctgatcctgctgcgtcatcatgacaacatccaacgtctgtggcgtcgtcaggagacaaaaatctggacgaaattcaaaagaaagcgcgaaaaggatcccgagtgatttctggtggatttacatgacctgatagccttcatcgggcttgcccagccgttgctggcaccatgccgccagaaattccacgcagacacgtaatttcatgctgcgatagagcggctcccggtaaacagcccagatattggcgctttgtgcatactctggcaatacttgcaccagtttgccactctccagaaacggcaacacatcccactcggaacgcagcataatccctttgccctccagcgcccattgcagcacaatctcgccgctattggaggaaagatgcccgcttaccttcacgctttttttctcctgaccgttccccaactcccatattccatgggtcatatcgcgctctttggtcaccagacagtcatgacgacttaattcctgtagggattgtggctgcggatatttttgcagatactcaggtgctgcgcataatattcttttattttttgtcaaaagatgcgcaatataataatcaggaatttcgtcattaatacgaatatccagatcaatattatcctgcactaaatcaatttgccgatcgaacaattcaaaatgcacctgtaactcaggataattgcgcatcagttcggtaatagctggcgcaatatggctgcgcccaaaaccaaaactgcaaccaatacgaatcatcccctccgggcgcgttttgatttgcgtgacgtcatcgaccagtcgctgatattgggtgaggatttccaacgcatgttcgtaacaacgttggccactttcagtcagcgccacgccgcgagcggagcggttcagcagcgttgttgccagcgtattttcaaggatttggatccgcttggtgacaaatgcaggcgtctgcccaagcgtcgccgctgcggcgctaaaactcccgctgtgaacgatttctaccagtacctgcaagtctttggctaaaggccagctattcagcatcgttaattatccgcagttgtgataagcgcagtgtatttcgcaaaacattgccattccctgctctggcgcaatattcattcttattttcgcgttgattcacgaactgttaattacatattcacggtggcaaaaaatataaaaccacatttttagtggtagtttgtggcggtgaatttttccagacaaatacaaaaactggagttgccatgatgagcgaaagtaataagcaacaggcagtgaataagttgacagagattgtcgctaactttaccgccatgatttctacccgaatgcctgatgacgtggtggataaactaaaacagctaaaggatgccgaaacgagcagcatggggaaaattatctaccatacgatgttcgacaacatgcaaaaagcgattgacctgaatcgtcctgcctgtcaggacaccggggagattatgttcttcgttaaagtcggttcccgcttcccactgcttggcgagctgcaaagcatactcaaacaagccgtggaagaggcaaccgtcaaagcgccactacgtcacaatgcggtagaaatttttgacgaagtaaacaccggcaaaaataccggtagcggcgtaccgtgggtcacctgggacatcatccccgacaatgacgatgcggaaatcgaagtttacatggcaggcggcggctgcacgctacctggccgcagcaaagtgttaatgccgagtgaaggctacgaaggcgtggtgaaattcgtcttcgaaaatatctccaccctcgccgtaaacgcctgtccaccggtactggtgggcgtgggcatcgccaccagcgtggaaaccgccgccgtactcagccgtaaagccattttgcgcccgattggcagccgccatcccaatccaaaagcggcagaactggagctacgcctggaagaaggactcaaccgtctggggattggtccacaagggctgaccggcaacagtagtgtgatgggcgtacatatcgaatctgccgcccgccatccgagtaccatcggcgttgctgtctctaccggctgctgggcgcatcgtcgcggcacgctgctggttcatgccgatctcacctttgaaaatctgtctcacacccggagcgcgttatgaaaaagatcctgacaaccccgatcaaagctgaagatctgcaagatattcgcgtcggcgatgtgatctacctgaccggtacgctggtgacctgccgcgacgtttgtcaccgccgtttgatcgaactgaaacgtccgatcccttacgatctcaacggcaaagcgattttccacgctggccccatcgtgcgcaaaaacggcgacaaatgggagatggtctccgtcggcccgacaaccagtatgcgtatggaaagttttgaacgtgaatttattgagcagaccggcgtgaaactggtggttggcaaaggtggtatggggccgctgaccgaagaaggctgccagaaattcaaggcgctacatgtgattttcccggcaggctgcgcggtgctggcggcaacccaggtggaagagattgaagaagtgcactggacagagctcggaatgccggagagtctgtgggtctgccgggtcaaagagttcggcccgctgattgtctctattgatacccacggcaacaacctgatagccgaaaacaaaaagctgttcgccgaacgccgcgatcccatcgtggaagagatctgcgagcacgtccattacatcaaataaccctcccggagaggctcacccctctcctttttcgcaggcataacacgatgaaaccttccactgaatggtggcgatatcttgcgccgctggcggtcatcgccattattgctctacttccggttcccgcagggctggagaaccatacctggctctactttgccgtttttactggcgtgatcgttggactgatcctcgaacccgtgccgggtgccgtggtggcgatggtgggtatatccatcatcgccatactctctccctggctgctgttcagcccggagcagctcgctcagccaggctttaaattcactgcaaaatccctcagctgggccgtttccggtttttctaatagcgttatctggctgattttcgccgcctttatgtttggcacaggctatgaaaaaaccgggcttggacgccgcattgcgctgattctggtgaaaaagatgggacatcgcacgctgtttctcggctatgcggtgatgttctccgagctgatcctcgcacctgtaacaccgtccaacagcgcgcgtggtgcggggattatctatcccatcatccgtaacctgccaccgctctatcaaagtcaaccaaacgacagcagtagccgcagcattggcagctacatcatgtggatggggattgttgccgactgcgtgaccagcgccattttcttgacggcgatggcaccaaacttgctgttaattggactgatgaaaagcgcatctcacgccacgctgagttggggcgactggttcctcgggatgttgccgctcagcattttactggttctgctggttccctggctggcttacgtgctgtacccgccggtactgaagtctggcgatcaggtgccgcgctgggcagagacggaactgcaggcaatgggcccgctctgtagccgtgaaaaacggatgctggggctgatggtaggcgcgctggtgctgtggattttcggcggtgattatatcgatgccgcgatggtcggttacagcgtggtggcactgatgctgcttctgcgcattatcagttgggacgacattgtcagtaataaagcggcgtggaacgttttcttctggctggccagccttatcaccctcgccaccggactcaacaacaccggttttattagctggtttggcaaactgttagcaggcagcttaagcggttatagcccaacgatggtgatggtggcgttgattgtggtgttttatctactgcgctactttttcgccagcgccacggcgtatacctccgctctcgcaccgatgatgattgctgctgcgctggcgatgccggaaatcccgctgccggtgttctgcctgatggttggtgcggcaattggtctggggagcattcttacaccatacgccaccggccccagtccgatttactacggcagtggttatctgccaacggcggattactggcgactgggggcgatttttgggctgatattcctcgtattgctggtgattaccggcttactgtggatgcccgtggtgttgctttaagtgaggacggtgccggaaattgctctccggcacccaatagttttacgcagccggtaactccgccagcggccagcgcggacgcacgctaacgccgagatccgccgtcgcgcctgctttaaaccgcaccattccggcataggcgatcatcgcgccgttatcagtacaaaattccggacgcgcgtagaacacttcgccgcggcgttttttcatcatttcagccagcttcgcccgtaacgtacggttagcactcacgccgcccgccatgaccagtcgcttaaagcccgtctgatccagcgcccgcttgcacttaatcatcagcgtatcgaccaccgcatcttcaaaggcgcgggcgatatcagcacgcgtctggtcgtcggtgccgttgtcacgaatggtatttgccgcgaaggttttcaggccggagaagctgaaatccagccccggacggtcggtcatcggacgcgggaagacaaagcgcccggcagtaccctgagccgccattttgctcagtaacggcccgccaggataatccagccccagcagcttcgcggttttatcaaacgcttccccggcggcatcatcgatagactcgccgagcagctcgtactgaccaatgccagtcacgctgattaactgcgtatgaccgccggaaacaagcagcgcaacaaacggaaattccggcgggttatcttccagcatcggcgctaacagatgcccttccatatggtgtacagggatcgccggaacgtcccaggcaaacgccagagaacgccccacggtcgcgccaaccagtagcgcgccgactaatccagggcctgcggtataggccacagcatcaatgtcttttgccgttaaaccagactcctttagcgccgcctggatcaacggtacggttttacgcacatgatcgcgggaggccagttcaggcacgacgccgccgtagtcagcgtgcaatttcacctgactatacaattggttggctaacaaacctttttcatcgtcgtaaatggcgatgccggtttcatcgcaggaagtttcaatacccagtacacgcatgacttgttttacctcgctttattaccgcgcagtgtaggaccaatgcgggttgatgtaaaactttgttcgcccctggagaaagcctcgtgtatactcctcacccttataaaagtccctttcaaaaaaggccgcggtgctttacaaagcagcagcaattgcagtaaaattccgcaccattttgaaataagctggcgttgatgccagcggcaaaccgaattaatcaaaggtgagaggcacatgccggtaattaaagtacgtgaaaacgagccgttcgacgtagctctgcgtcgcttcaagcgttcctgcgaaaaagcaggtgttctggcggaagttcgtcgtcgtgagttctatgaaaaaccgactaccgaacgtaagcgcgctaaagcttctgcagtgaaacgtcacgcgaagaaactggctcgcgaaaacgcacgccgcactcgtctgtactaattccccgagagcgttgctctccgatcagaccgagttgtagttgtaaggccgtgcttccgaaaggaatgcgcggcttattttcgtttatgaattgctaaaaatcggggcctatggctggacgaatcccacgcgtattcattaatgatctgctggcacgcactgacatcgtcgatctgatcgatgcccgtgtgaagctgaaaaagcagggcaagaatttccacgcgtgttgtccattccacaacgagaaaaccccgtccttcaccgttaacggtgagaaacagttttaccactgctttggatgtggcgcgcacggcaacgcgatcgacttcctgatgaactacgacaagctcgagttcgtcgaaacggtcgaagagctggcagcaatgcacaatcttgaagtgccatttgaagcaggcagcggccccagccagatcgagcgccatcagaggcaaacgctttatcagttgatggacggtctgaatacgttttaccaacaatctttacaacaacctgttgccacgtctgcgcgccagtatctggaaaaacgcggattaagccacgaggttatcgctcgctttgcgattggttttgcgccccccggctgggacaacgtcctgaagcggtttggcggcaatccagaaaatcgccagagtttgattgatgcggggatgttggtcactaacgatcagggacgcagttacgatcgtttccgcgagcgggtgatgttccccattcgcgataaacgcggtcgggtgattggttttggcgggcgcgtgctgggcaacgatacccccaaatacctgaacagcccggaaacagacattttccataaaggccgccagctttacggtctttatgaagcgcagcaggataacgctgaacccaatcgtctgcttgtggtcgaaggctatatggacgtggtggcgctggcgcaatacggcattaattacgccgttgcgagcttaggtacgagtaccaccgccgatcacatacaactgttgttccgcgcgaccaacaatgtcatttgctgttatgacggcgaccgtgcaggccgcgatgccgcctggcgagcgctggaaacggcgctgccttacatgacagacggccgtcagctacgctttatgtttttgcctgatggcgaagaccctgacacgctagtacgaaaagaaggtaaagaagcgtttgaagcgcggatggagcaggcgatgccactctccgcatttctgtttaacagtctgatgccgcaagttgatctgagtacccctgacgggcgcgcacgtttgagtacgctggcactaccattgataagccaagtgccgggcgaaacgctgcgaatatatcttcgtcaggaattaggcaacaaattaggcatacttgatgacagccagcttgaacgattaatgccaaaagcggcagagagcggcgtttctcgccctgttccgcagctaaaacgcacgaccatgcgtatacttatagggttgctggtgcaaaatccagaattagcgacgttggtcccgccgcttgagaatctggatgaaaataagctccctggacttggcttattcagagaactggtcaacacttgtctctcccagccaggtctgaccaccgggcaacttttagagcactatcgtggtacaaataatgctgccacccttgaaaaactgagcatgtgggacgatatagcagataagaatattgctgagcaaaccttcaccgacagtctcaaccatatgtttgatagcctgcttgaactgcgccaggaagagttaatcgctcgtgagcgcacgcatggtttaagcaacgaagaacgcctggagctctggacattaaaccaggagctggcgaaaaagtgatttaacggcttaagtgccgaagagcgatcgggaagcccccgacagccgcactgagaggcagcggcaaatatataagtacgccctcgtaattatcgttggcggtaaacaaccgttggatttcagcgttaacggctgaaggacatcgggtcaatcgcccaacaccaacctcatgaaataagtgtggataccgtcttatggagcaaaacccgcagagtcagctgaaacttcttgtcacccgtggtaaggagcaaggctatctgacctatgccgaggtcaatgaccatctgccggaagatatcgtcgatagtgatcagatcgaagacatcatccaaatgatcaacgacatgggcattcaggtgatggaagaagcaccggatgccgatgatctgatgctggctgaaaacaccgcggacgaagatgctgccgaagccgccgcgcaggtgctttccagcgtggaatctgaaatcgggcgcacgactgacccggtacgcatgtacatgcgtgaaatgggcaccgttgaactgttgacccgcgaaggcgaaattgacatcgctaagcgtattgaagacgggatcaaccaggttcaatgctccgttgctgaatatccggaagcgatcacctatctgctggaacagtacgatcgtgttgaagcagaagaagcgcgtctgtccgatctgatcaccggctttgttgacccgaacgcagaagaagatctggcacctaccgccactcacgtcggttctgagctttcccaggaagatctggacgatgacgaagatgaagacgaagaagatggcgatgacgacagcgccgatgatgacaacagcatcgacccggaactggctcgcgaaaaatttgcggaactacgcgctcagtacgttgtaacgcgtgacaccatcaaagcgaaaggtcgcagtcacgctaccgctcaggaagagatcctgaaactgtctgaagtattcaaacagttccgcctggtgccgaagcagtttgactacctggtcaacagcatgcgcgtcatgatggaccgcgttcgtacgcaagaacgtctgatcatgaagctctgcgttgagcagtgcaaaatgccgaagaaaaacttcattaccctgtttaccggcaacgaaaccagcgatacctggttcaacgcggcaattgcgatgaacaagccgtggagcgaaaaactgcacgatgtctctgaagaagtgcatcgcgccctgcaaaaactgcagcagattgaagaagaaaccggcctgaccatcgagcaggttaaagatatcaaccgtcgtatgtccatcggtgaagcgaaagcccgccgtgcgaagaaagagatggttgaagcgaacttacgtctggttatttctatcgctaagaaatacaccaaccgtggcttgcagttccttgacctgattcaggaaggcaacatcggtctgatgaaagcggttgataaattcgaataccgccgtggttacaagttctccacctacgcaacctggtggatccgtcaggcgatcacccgctctatcgcggatcaggcgcgcaccatccgtattccggtgcatatgattgagaccatcaacaagctcaaccgtatttctcgccagatgctgcaagagatgggccgtgaaccgacgccggaagaactggctgaacgtatgctgatgccggaagacaagatccgcaaagtgctgaagatcgccaaagagccaatctccatggaaacgccgatcggtgatgatgaagatagccatctgggggatttcatcgaggataccaccctcgagctgccgctggattctgcgaccaccgaaagcctgcgtgcggcaacgcacgacgtgctggctggcctgaccgcgcgtgaagcaaaagttctgcgtatgcgtttcggtatcgatatgaacaccgactacacgctggaagaagtgggtaaacagttcgacgttacccgcgaacgtatccgtcagatcgaagcgaaggcgctgcgcaaactgcgtcacccgagccgttctgaagtgctgcgtagcttcctggacgattaatcggtaggccggatcaggcgttacgccgcacccggcactaggccctctgcacaaacgccaccttttcggtggcgttttttatcgcccacgcactaccagcgcctggtccagctcgcgatacgcttcaaccagtttctccagactaacgcgacttaaaccgctgggatttggcagcacccaaatctgcgtgctaccaatggtgagcgtttgtttcccccactgtgcaccgcgctggctgaatccctgttcatatgcttgtttgcccagaatcgccaacgcctgcggctgataatcttcaattttttcaatcagcttacgcccgcctgcgtgtagctcctgcttactaacttcattggcttgcaccgttggacggtctaccagtttggtgacgccacaacgataatccagcagatgctgtgcctcctgcggcttcaactgacggtcggtaaacccggcctgatatatcaccttccagaagcgatttgccggatgagcaaagggaaaaccagtcccggcggaactaagcccagggttgataccgcaaaacacgacccgtaaccctggagccaaaatatcctcaaccatatttactcctttctaacatcaccaggaaaagtataacggattgaaaatacattgtttataaaaacagcaggcgcgcggtaatggctggattgcgacacggagttactttataatccgctaccatggccccttagctcagtggttagagcaggcgactcataatcgcttggtcgctggttcaagtccagcaggggccaccagatatagcaaaggctgacgagaaatcgtcagcctttttctttttatatatcagttactttgcgtgccagtaagccgctgcacgtacccgctgtgggtcatactgttccgcttcaaagcggcggcttaaattcttaacgactttaccttcgccggttatccagatgaagtaatcatcggcagggatttgcatctgcgccagacgcgcatctaccgcctgctcatcatgtgccagccattcgatattaaaaccatcaaggtgcgcgagataatcctgacaggcgttatcccgcacgctaaccagcgcactaacttgcggtttaacggcaagtttgctcaacgtttccaggcggcggcgcaatgcaggcattccggattcatcgcagacatacagctgatacgcgtaatcttccggcaccaccaggctaccgcgcggacctgccaccgtaagtttatcgcccggttgcgcctgcatcgcccagccgctggcgaccccaccgtcgtgaataaagaaatcaatcgccagttcatggcgtagttcgtcatacagcggcgtatagtcacggctcggtgggcgtggtccttccggccagacgatgccctcttccgttaccgttggcggcacaaagtgagcgtcaggttgaggaaagaagagtttgctgtgatcgtcaaagccacggcttgtaaaaccgtccagcgcctcgccgccgaggacaatgcgctgaaaaccggcgctgatgcgctcaacgcgtaacacagtcagttcacggaagcgcagatcattgcgaacgcgctgcgggtagcggggggtgttattcattgttatcgccttcgtgatggtaatcagatatatctaaataaaactcgcaaatgataatgattgttaatcatgataaatgcaagcgatttgtagaactgatatgtctatagtctgataagacgaaccgcctcttctcaggcatcattactcaacgccggatgcggcgtgaacgccttatccggcctacgtgtgagatgagtccacgtttaaaaatcatttttacacttgcaagaacgctcatatcagatataaattagatatatctaattaagcaaaaggaggctgatatgagccatcatcacgaagggtgttgtaaacatgaaggccagccacgccatgagggctgctgcaaaggtgagaagagtgaacacgagcactgcggacacggtcaccagcatgaacacggtcaatgctgcggtggtcgccacggtcgcggcggcggtcgtcggcaacgtttctttggtcacggtgaattacgtctggtgattctggatattctcagccgcgatgacagccacggttacgaattgattaaagcgattgagaatctaacccaggggaattacaccccaagcccgggcgtcatctacccaacgctggattttctgcaggagcagagcctgattaccatccgcgaagaggaaggaggtaagaagcagattgcgctgaccgaacaaggcgcgcagtggctggaagaaaaccgcgaacaggtggagatgattgaagaacgcatcaaagcgcgttgcgttggcgcggcgctgcgccagaacccgcaaatgaagcgggcgctggataattttaaagcggtgctggatttacgcgtcaaccagagcgatatcagtgatgcacaaataaaaaagatcattgcggtgatcgaccgcgccgcttttgatattacgcaactggattaatcgccgcatccgccagtggcgcggtgcaattgccggatgcgacgcttgacgcgccttatccggcctacacccgctacacaccccgcaggcctgataagatgcgccagcatcgcatcaggcattgtgctccaaccgccggatccggcataccgattaatgcagtaccgtcaccgcgtcttccagtcggctggcgcggtgtttcaccatcgcgctcacctgcgcactctcttccaccagctcggcatttttctgggtgatcaggttaagctcatccactgcacgggtcaggctggaaagcccatcggcctgttccagcgtactatggctaatctgggcgatcaactgggtgacgtttttcacctgtgccacaatatcttccatcgtccgtccggcggcgtgtacctgctggctaccggattgcaccttatcagcactggcatcaatcagcttgcgaatatcgttggcagcattagcgctgcggctggctaaatgacgcacttcccctgccaccactgcaaaacctttgccctgttcgccggcacgcgccgcttccaccgccgcattcagggccagaatattggtctgaaacgcaatatcgttaatcaggctagtaatggtgccaatgcgctgggtactgtcggcgatatcgtccattgtcttgatcaccgtggtcatcgcctccccaccctgcactgccgcattactggcagtgatactcagtttatcggcagcgctcgccgtggcagagttctgtttcacgctcgccgccatttggttcatggtcgccaccgtttgctgaacgttatcaactgtctgctgggtatgttcgttcagttcatcggtgcctttcgccagcgtctcactgccatttctgacactggacacctggctactgacatcgttaattagccaacggcacatcaggccaagttgccctaccgcacgtaatgtcagccccagctcatcgctgcgattcagatgctcaacactattacgttctccggtcgccaccttcagtgcctgatgggcaacattttctatcgggcgcacaatctgccattcaaaacaggcgcttgccaacaataccactaacgcacagaggatatacgtcaccaccggggcagcaacaaaccaaagcatggccgccagcaagataaacatcagggtcatcactccacgcgcccgccagcgaagcggtaaactaggcagtttacccagccagcctttacgcaccaccaggcctttatgaatacgcttactggtacgtccggcgttcaacgctttgtacagcggctccaccgccgcgatctcttcatccgtcgcccgggtacgaatgctcatatagccactgatttttccctcgcgcaccatcggtaccgcattggcccgcacccaataatggtcaccatttttgcggcgatttttcacgatgccgctccagggctccccttttttcagggtgaaccacatatccgcaaacgccgcttttggcatatccgggtgacgcaccatgttgtgcggctgcccttgtaactcttgcaaggtatagccgctcacctgcacaaaagtgtcattagcatgagtgatatagctttgcagatcggtagtggacatcagagtggtatcgtccgccagcggggtattttgctgggtgacatacggatgagaagacatgttcgcgtcctgtgcaggttatatggttgttaacttcttgtcagagtttatgtcggccccgctgcggttatctttaaccgattaatttgatttagatcgcaatttgcgatttaaacacaaatctaattccttgatttaaaatactttcactctgttactatacgaaaacgttaattatcttgcccaaaaatcaggcaattattgccctgaaaacgtgcatttgcgcagcaatcatcaaatccatacccgacaaaaaccgtgcaaaataacaacaaatgttaacagatagcattaaatattgcacaaatgataaccgaatttgtgtttatcccgattttcgcgatcgcagccggagtggcgcaatccctgcaatacttaaatcggtatcatgtgatacgcgagcctccggagcatattttgaacaggttacctagcagcgcaagcgctttagcgtgcagcgcccacgccctgaatctcattgagaagcgaacgctggatcatgaggagatgaaagcacttaaccgagaggtgattgaatacttcaaagagcatgtcaatccggggtttttagagtatcgcaaatctgttaccgccggcggggattacggagccgtagagtggcaagcgggaagtttaaatacgcttgtcgacacccagggccaggagtttatcgactgcctgggaggttttggaattttcaacgtggggcaccgtaatccagttgtggtttccgccgtacagaatcaacttgcgaaacaaccgctgcacagccaggagctgctcgatccgttacgggcgatgttggcgaaaacccttgctgcgctaacgcccggtaaactgaaatacagcttcttctgtaatagcggcaccgagtccgttgaagcagcgctgaagctggcgaaagcttaccagagtccgcgcggcaagtttacttttattgccaccagcggcgcgttccacggtaaaagtcttggcgcgctgagcgccacggcgaaaagcaccttccgcaaaccgtttatgccgttactgccgggcttccgtcatgtgccgtttggcaatatcgaagccatgcgcacggctcttaacgagtgcaaaaaaaccggtgatgatgtggctgcggtgatcctcgaaccgattcagggtgaaggtggcgtaattctgccgccgccgggctatctcaccgccgtacgtaagctatgcgatgagttcggcgcactgatgatcctcgatgaagtacaaacgggcatggggcgcacgggcaagatgttcgcctgcgagcatgagaacgtacagccggatatcctctgccttgccaaagcgctcggcggcggcgtgatgccgattggcgcgaccatcgccactgaagaggtgtttagtgttctgttcgacaacccattcctgcataccaccacctttggcggcaacccgctggcctgtgcggcggcgctggcgaccatcaatgtgttgctggagcagaacttaccggctcaggctgagcaaaaaggcgatatgttgctggacggtttccgtcaactggcgcgggaatatcccgatctggtacaggaagcgcgtggtaaagggatgttgatggcgattgagtttgttgataacgaaatcggctataactttgccagcgagatgttccgccagcgcgtactggtggccggaacgctcaataacgccaaaacgatccgcattgaaccgccactgacactgaccattgaacagtgtgaactggtgatcaaagcggcgcgtaaggcgctggcggccatgcgagtaagtgtcgaagaagcgtaatatcaaatcggatggcgatacgacgtcgccatccgatctttttatacgacgcgtacgcccgcaggcatcatccgctccggcgttaacagcacgctttcactgccgtcatcggtttccgcacacaacagcatgcattcgctcgtttcaccacgcattttcgctttttgcagattgcataagaccaccaccgttttccccatcagctcttcttcgctgtagtacggcaccaggctggtcacggtttgcagcgttttttgccccacatcaacctgtacgatgtacagcttgtcggcgttttcatggcgtttcacttccacaatctttccgacgcgcatttccagacgtgcaaaatcagcgtaagccacggtttccattgcttcctcccttagggtaaaattttactaaactatagcaaaagtttttctcaatcctgtaggctaaaaatggagaatgcaggcgtgatcacattcgtgagccgctgtgttaccgttacagcgtcaaagaaacgcgctttatttactgaaaacaggtgacccgataagcacttcctctacaatgggggcgcacatcagggaaagtaaaaaaggtaaacatggcaacactaaaagacatcgcaatcgaagctggcgtatccctggcgacagtatccagggtcttaaatgacgatccgacattgaatgtgaaagaagagacgaaacatcgcattctcgagatcgccgaaaagctggagtacaagaccagtagtgcccgtaaactccagacaggtgcagtcaaccaacaccatattctggctatctacagctaccagcaggagctggagatcaacgatccttactatctggcgatccgccacggcattgaaacccagtgcgaaaagctgggcatcgagctcaccaactgttatgaacacagcggcttaccagacattaaaaacgtcaccggtattttaattgtcggcaaacccacgcccgccctgcgcgccgctgccagcgcgttgaccgacaatatctgttttatcgactttcacgaacccggcagcggttacgatgcggtggatatcgatctggcacgcatcagtaaagaaatcatcgacttctatatcaaccagggcgttaatcgtattggttttattggcggtgaagatgagcctggcaaggcggatattcgtgaggtcgcctttgcggaatatggccgactgaaacaagtggtacgcgaagaggatatctggcgcggcggtttttccagtagcagcggttatgaactggcaaaacaaatgctggcgcgggaagactatccgaaggcactgtttgttgcttccgattccattgctatcggcgtactgcgggcaattcatgaacgaggcctgaacatcccacaggatattagccttatcagcgttaacgatatccccaccgcgcgatttacctttccgccgctctccaccgtgcgcatccattccgagatgatgggaagtcagggcgttaacctggtgtatgaaaaagcccgcgatggtcgcgcgctgccgctgttagtcttcgttcccagcaaattaaaactgcgcggcacgacccgttaaatccccttacacactgtccggcaatcgtttttgccggacagtgctgccgtttattttcgtgatccagttaaagtaaatgcatttacctgctactttttagtaaaaattttactaaactccccagcaattacacaaactaccatcaccatgaatggttccgatttctctctaccgggaggccctatgaatcgctgggaaaacattcagctcacccacgaaaaccgacttgcgccgcgtgcgtacttttttagttatgattctgttgcgcaagcgcgtacctttgcccgcgaaaccagcagcctgtttctgcccttaagcggtcagtggaatttccacttttttgaccatccgctgcaagtaccagaagccttcacctctgagttaatggctgactgggggcatattaccgtccccgccatgtggcaaatggaaggtcacggcaaactgcaatataccgacgaaggttttccgttccccatcgatgtgccgtttgtccccagcgataacccaaccggtgcctatcaacgtattttcaccctcagcgacggctggcagggtaaacagacgctgattaaatttgacggcgtcgaaacctattttgaagtctatgttaacggtcagtatgtgggtttcagcaagggcagtcgcctgaccgcagagtttgacatcagcgcgatggttaaaaccggcgacaacctgttgtgtgtgcgcgtgatgcagtgggcggactctacctacgtggaagaccaggatatgtggtggagtgcggggatcttccgcgatgtttatctggtcggaaaacacctaacgcatattaacgatttcactgtgcgtaccgactttgacgaagcctattgcgatgccacgctttcctgcgaagtggtgctggaaaatctcgccgcctcccctgtcgtcacgacgctggaatataccctgtttgatggcgaacgcgtggtgcacagcagcgccattgatcatttggcaattgaaaaactgaccagcgccagctttgcttttactgtcgaacagccgcagcaatggagtgcagaatccccttatctttaccatctggtcatgacgctgaaagacgccaacggcaacgttctggaagtggtgccacaacgcgttggcttccgtgatatcaaagtgcgcgacggtctgttctggatcaataaccgttatgtgatgctgcacggcgtcaaccgtcacgacaacgatcatcgcaaaggccgcgccgttggaatggatcgcgtcgagaaagatctccagttgatgaagcagcacaatatcaactccgtgcgtaccgctcactacccgaacgatccgcgtttttacgaactgtgtgatatctacggcctgtttgtgatggcggaaaccgacgtcgaaagccacggctttgctaatgtcggcgatattagccgtattaccgacgatccgcagtgggaaaaagtctacgtcgagcgcattgttcgccatatccacgcgcagaaaaaccatccgagcatcatcatctggagcctgggcaatgaatccggctatggctgtaacatccgcgcgatgtaccatgcggcgaaagcgctggatgacacgcgactggtgcattacgaagaagatcgcgatgctgaagtggtcgatattatttccaccatgtacacccgcgtgccgctgatgaatgagtttggtgaatacccgcatccgaagccgcgcatcatctgtgaatatgctcatgcgatggggaacggaccgggcgggctgacggagtaccagaacgtcttctataagcacgattgcattcagggtcattatgtctgggagtggtgcgaccacgggatccaggcacaggacgaccacggcaatgtctggtataaattcggcggcgactacggcgactatcccaacaactataacttctgtcttgatggtttgatctattccgatcagacgccgggaccgggcctgaaagagtacaaacaggttatcgcgccggtaaaaatccacgcgcgggatctgactcgcggcgagttgaaagtcgaaaataaactgtggtttaccacgcttgatgactacaccctgcacgcagaggtgcgcgccgaaggtgaaacgctcgcgacgcagcagattaaactgcgcgacgttgcgccgaacagcgaagcccccttgcagatcacgctgccgcagctggacgcccgcgaagcgttcctcaacattacggtgaccaaagattcccgcacccgctacagcgaagccggacaccctatcgccacttatcagttcccgctgaaggaaaacaccgcgcagccagtgcctttcgcaccaaataatgcgcgtccgctgacgctggaagacgatcgtttgagctgcaccgttcgcggctacaacttcgcgatcaccttcagtaaaatgagtggcaaaccgacatcctggcaggtgaatggcgaaagcctgctgactcgcgagccaaagatcaacttcttcaagccgatgatcgacaaccacaagcaggagtacgaagggctgtggcaaccgaatcatttgcagatcatgcaggaacatctgcgcgactttgccgtagaacagagcgatggtgaagtgctgatcatcagccgcacagttattgccccgccggtgtttgacttcgggatgcgctgcacctacatctggcgcatcgctgccgatggccaggttaacgtggcgctttccggcgagcgttacggcgactatccgcacatcattccgtgcatcggtttcaccatgggaattaacggcgaatacgatcaggtggcgtattacggtcgtggaccgggcgaaaactacgccgacagccagcaggctaacatcatcgatatctggcgcagcaccgtcgatgccatgttcgagaactatcccttcccgcagaacaacggtaaccgtcagcatgtccgctggacggcactgactaaccgccacggtaacggtctgctggtggttccgcagcgcccaattaacttcagcgcctggcactatacccaggaaaacatccacgctgcccagcactgtaacgagctgcagcgcagtgatgacatcaccctgaacctcgatcaccagctgcttggcctcggctccaactcctggggcagcgaggtgctggactcctggcgcgtctggttccgtgacttcagctacggctttacgttgctgccggtttctggcggagaagctaccgcgcaaagcctggcgagctatgagttcggcgcagggttcttttccacgaatttgcacagcgagaataagcaatgaggatcatcgataacttagaacagttccgccagatttacgcctctggcaagaagtggcaacgctgcgttgaagcgattgaaaatatcgacaacattcagcctggcgtcgcccactccatcggtgacagtttgacttaccgcgtggagacagactccgcgaccgatgcgctatttaccgggcatcgacgctattttgaagtgcattactacctgcaagggcagcaaaaaattgaatatgcgccgaaagagacattacaggtagtggaatattatcgtgatgaaactgaccgtgaatatttaaaaggctgcggagaaaccgttgaggtccacgaagggcaaatcgttatttgcgatatccatgaagcgtatcggtttatctgcaataacgcggtcaaaaaagtggttctcaaagtcaccatcgaagatggttatttccataacaaataacaactacggcggcaaaaggagtttgccgccaccgctaccctactcattttcggagatgtgttatgtctgataccaaacgtaatacaatcggcaaattcggcttgctcagcctgacttttgccgccgtttacagctttaacaacgttatcaataataatattgagcttggactggccagcgcaccgatgtttttcctcgcgacgattttttattttattcccttctgtctgatcatcgcagaatttgttagcttaaataaaaacagtgaagccggtgtctacgcgtgggtaaaaagtagcctgggcggacgttgggcatttattactgcctatacctactggttcgtaaacctgttctttttcaccagtctgttgccgcgcgttattgcttatgctagctatgccttcctcggatacgaatatattatgacgccggttgccaccaccattatcagtatggtgctgttcgccttctccacctgggtttccaccaacggggcgaaaatgttggggccaattacctccgtcactagtacgctgatgctgctgttaacgctctcctacattttactggcaggtacggcgctggttggcggcgtacagcctgctgacgccatcaccgttgacgcgatgatcccgaacttcaactgggcgttcctcggcgttaccacctggatctttatggccgcaggtggcgcggagtccgtcgctgtgtacgttaacgacgtcaaaggcggtagcaaaagcttcgttaaagtgatcatcctcgccgggatttttatcggcgtactgtattccgtctccagcgtgctgattaacgtcttcgtcagcagcaaagagttgaaatttaccggcggaagcgtgcaggtattccacggcatggcggcgtattttggtctaccggaagcgttgatgaatcgctttgtcggtctggtgtcctttaccgcgatgttcggttccctgctgatgtggaccgcaacgccggtgaaaattttcttctccgaaatcccggaaggcatctttggtaagaaaaccgtcgaactgaacgaaaacggcgttccggcgcgcgcagcgtggatccagttcctgatcgtcatcccgctgatgattatcccgatgctcggttccaataccgtgcaggatctgatgaatactattattaatatgaccgccgcagcgtccatgcttccgccgttattcatcatgctggcttacctgaatttacgcgccaaattagatcacctgccacgcgatttccgtatgggctcccgccgcaccggtattatcgttgttagtatgctgattgcgatatttgccgtagggtttgtcgctagcacattcccgactggcgcgaatattctgaccatcattttttataacgtcggcggtattgttatcttccttggctttgcgtggtggaaatacagtaaatatataaagggattaacggctgaagagcgccatattgaagcgacgccagccagcaatgttgattaagcagaataataaaaaatgagcaggcattttccctcttcctggatgaggagagggaaaatagtttctgcctttatatttttataattacaacgataaaaggctgtactttttctttagctcatggattaacacaatgaaattaatcactgcaccatgcagagcattacttgctctgccgttttgctacgccttttctgcggcaggagaagaagcacgtccggcagaacatgacgacacaaaaacacccgcaattaccagcacatcttctcctagttttcgtttttacggcgaattaggggttggtggatatatggatttagagggtgagaataaacataaatacagcgacggtacctatattgaaggtggcctggagatgaagtacggctcctggttcggcctgatttacggcgaaggctggaccgtgcaggccgaccacgacggcaatgcctgggtgccagaccatagctggggtggtttcgagggcggaattaaccgtttctatggcggttatcgtaccaatgatggcaccgaaatcatgctcagtctgcgtcaggattccagcctggatgacctgcaatggtggggcgatttcacccccgatctgggctacgtcattcccaatacccgcgacattatgactgcgctgaaggtacagaacttaagcggcaactttcgttatagcgtcaccgcgactcctgccggacatcatgatgaaagcaaagcctggctacattttggcaaatacgatcgctatgacgacaaatacacctatccggcaatgatgaacggttacatccagtatgaccttgccgaaggcatcacctggatgaacggtctggaaatcaccgacggcacaggacagctctatctcacgggcctgctaactcctaactttgccgctcgcgcctggcaccataccggacgcgccgacgggctggacgtaccgggaagtgaaagtgggatgatggtgagcgccatgtatgaagcgttaaagggcgtttatctctccaccgcttacacctacgccaaacatcgccctgaccacgctgacgatgaaaccacctctttcatgcagtttggtatctggtacgaatacggcggcggacgtttcgccacggcttttgatagccgcttctacatgaaaaatgcctctcacgatcccagcgaccaaatcttcctgatgcaatatttctactggtaataaggactgtaatttcatgaaaataaaaactattttaacgccagtaacctgcgctctgctgataagtttttccgcccatgccgctaacgccgacaattataaaaacgtgattaaccgtactggcgcgccgcagtacatgaaggattacgattacgacgatcaccagcgttttaatccgtttttcgatctcggagcctggcatggtcatctgttgccagacggccctaacaccatgggcggctttccgggcgttgcgctgctgacggaagagtacatcaactttatggccagcaatttcgaccgcctgaccgtctggcaggacggcaagaaagtcgactttacgctggaggcatacagtattcccggtgcgctggtgcaaaaactgacagcaaaagatgtgcaagtcgaaatgactctgcgcttcgccacgccgcgcacgagtctactggaaaccaaaatcaccagcaataaaccgctggatctggtgtgggacggcgaactgctggaaaaactggaagcgaaagaagggaaaccgctttccgataaaaccattgctggcgaataccctgactatcagcgcaaaatcagcgccacccgtgatggcctgaaagtcacctttggcaaagtgcgcgccacctgggatctgctgacctccggcgaaagcgaatatcaggtgcataaatccctgccggtgcagactgaaatcaacggtaatcgctttaccagtaaggcgcatatcaacggtagcaccacgctctacaccacctattcccatctgctgaccgctcaggaagttagcaaagagcaaatgcagatccgcgatattctggcgcgtccggcgttttatctcaccgccagccagcaacgctgggaagaatacctgaagaaagggttaaccaatccggatgcgacgccggaacagacgcgcgtcgcggtgaaagcgatcgaaacgctcaacggtaactggcgcagtccgggcggtgcggtgaaatttaacaccgttacaccgagcgtgaccgggcgctggttctccggcaatcagacctggccgtgggatacctggaagcaggcgtttgcgatggcgcatttcaatccggacatcgccaaagagaatatccgcgcggtcttctcctggcagatccagcctggcgatagcgtgcgtccgcaggatgtgggctttgtccccgacctgatagcgtggaaccttagccccgagcgtggtggcgatggcggcaactggaacgaacgtaataccaaacccagccttgccgcctggagcgtgatggaagtgtataacgtcacccaagataaaacctgggtggcagagatgtacccgaaactggtggcctatcacgactggtggttacgtaaccgcgatcacaacggcaacggcgtgccggaatatggcgcgacccgcgacaaagcccacaacactgagagcggcgagatgctgtttacggtgaaaaaaggcgataaagaagagacgcagtctgggctgaacaactacgcccgcgtggtggagaaaggccagtacgacagtctggaaattccggcacaggttgctgcaagctgggaaagcgggcgtgatgatgccgccgtctttgggtttatcgacaaagaacagttggataaatatgtcgctaatggcggcaaacgtagcgactggacggtgaaattcgccgaaaaccgcagtcaggacggaacgttgctgggctacagcctattgcaggagagcgtggatcaggccagctatatgtacagcgataaccattatctggcggagatggcaaccatcctcggtaagccagaagaggccaaacgctatcgccagttggcacagcagctcgcggactacatcaacacctgtatgttcgacccgactacccagttctactatgacgtacgtattgaagataaaccactggcgaacggctgcgcgggcaaaccgattgttgagcgcggtaaagggccggaaggctggagcccgctgtttaacggtgcggcaacgcaggccaatgccgacgcggtggtgaaggtgatgctcgatcctaaagagttcaacacctttgtcccgctgggaacggcggcgttaaccaatccggcttttggcgctgatatctactggcgtgggcgcgtatgggtggatcagttctggtttggtctgaaagggatggagcgttacggttatcgtgatgatgccctgaagctggcggatacgttcttccggcacgccaaagggttaaccgccgatggaccaattcaggaaaattacaacccgctgacaggcgcacagcaaggcgcaccaaatttctcctggagtgccgcgcatttgtatatgttgtataacgattttttccgtaagcaataatttgcaactgctggcggatgcggcgtaaacgccttatccgccctacatgtgcaatcctcctggccggataaaacgcggcaagcgttgcatccggcaactgcaccgcgccactggcggatgcggcgtgaacgccttatccgccctacatgtgtgttcccgtaggtcggataagacgcgacaagcgtcgcatccggcatctgcaccgcgccactggcggatgcggcgtggacgccttatccgccctacatgtgcaattccgtaacctggataaaacgcgacaagcgtcgcatccggcgttatcaccgggcgtattctttttgaatcccatcacaaaccccgcactccccttttcccttttctccggcgacggctaaattagaactcatccgaccacataacaattattttacatactggacaattttatgagctacccgagcctgttcgccccgctggatttaggttttaccacgttaaaaaaccgcgtgttgatgggcagtatgcacaccgggctggaggaatacccggacggtgccgagcggctggcagcgttttatgccgaacgcgcccgtcacggcgtggcgctgattgtcagcggcggcattgcaccagatttaacaggcgttggcatggaaggtggcgcaatgctcaacgacgccagccagatcccacaccatcgcaccattaccgaagcggtacatcaggaaggcggcaaaatagccctgcaaattttgcataccgggcgctacagctaccaaccgcatctggtcgccccgtccgcattgcaggcccccatcaaccgtttcgtgccccatgagttaagccatgaagagatcctgcaactgatcgacaatttcgcccgctgcgcgcaactggcgcgggaggcaggatacgacggtgtagaggtgatgggttccgaagggtatttgatcaacgaatttctgacgctgcgcaccaatcagcgtagtgaccagtggggcggcgattaccgcaaccggatgcgatttgccgtagaagtagtgcgtgcggtgcgcgaacgcgtcggcaacgacttcattattatctaccgactgagcatgctcgacctggtcgaagacggcgggacttttgccgaaacggtagagctggcgcaggccattgaagcggcgggcgcgaccattatcaacaccggcattggctggcatgaagcacgtattccgaccattgccacgcccgtgccgcgcggcgcatttagctgggtcacgcgcaaactgaaaggccacgtcagcctgccgctggtaaccaccaaccggattaacgatccgcaggttgccgacgatattctcagccgcggcgatgccgatatggtaagcatggcgcgaccgtttcttgctgatgcggagctgctgagtaaagcgcaaagcggacgagccgatgagatcaacacttgtattggctgcaatcaggcctgtctcgatcaaatcttcgttggcaaagtcaccagctgcctggtgaatcctcgcgcctgccacgaaaccaaaatgccaatccttcccgccgtgcagaaaaaaaatctggcggtggtcggtgcgggacctgctgggctggcgtttgccattaacgcggcggcgcgtgggcatcaggtaacattgtttgacgctcatagcgagattggcgggcagtttaatatcgccaaacagatccccggcaaagaggagttttacgaaacgctgcgctattaccgccggatgatcgaagtgacgggcgtgacgctaaaactcaatcacaccgtgacggcggatcagttacaggctttcgatgaaacgatcctcgccagtgggatcgtgccgcgcactccgcccatcgacgggatcgatcatccgaaggtattgagttatctcgatgtactgcgcgacaaagcgccggttggcaacaaagttgccatcatcggttgtggcgggattggttttgatacggcgatgtatttaagtcagccgggcgaatccaccagccagaatatcgccgggttctgtaatgaatgggggatcgacagtagcctacaacaggctggtggcttaagcccgcagggaatgcagatcccccgtagcccacggcagattgtgatgctccagcgcaaagccagcaaaccaggacaggggttaggcaaaaccaccggctggatccatcgcaccaccctgctcagccggggtgtgaaaatgatcccaggcgtaagttatcagaagattgacgatgacgggctgcatgtggtgatcaacggcgaaacgcaggtattagcagtggacaatgtggtgatctgcgcagggcaagagccaaaccgcgcgctggcgcaaccgctgattgatagcgggaaaacggtgcatttaattggcggctgcgatgtggctatggagctggacgcacgacgggcaattgcccagggaacacggctggcgctggagatttaaatcgttatttgaagcgccggatgcaacgcatccggcacgtcgcgttaatcaataaacaaggcgggagaaatgccgaatcgcgttgccaattttttagcgtgttccagcgttaatttcctcttcccgctcaaaacgcgactcaccatagatttactgccaatttccggcagatcggaaagggttaaaccatattgatccataagggtacgaatcacggctataccgccaggcatggcttgagccatggcattaaattccgcaaattcgggcgcactttcttcccacgcggttattttggcacacaccagatccagcaaggggttttcaggatcgttgagcagcagatgatctaccagttccagcgcctgggtgtattgttcctcgttctgaatacccgccagaaaaggtgccacagcagttagcttttctcctgcttgcaagatgtcggcaatcgcaatcattttttccccttagtacgatgaacagcggtaaagaaatcgtattctttatgcgtcataacttcacgtatgtagcacttttggctttcaaaaaagaccattgctacaacacgtaattcattgcccccaacattgaaaacataatgcttatccagatatttgaagttatccagagatgggaatactgcttttaaactctcaggttttttgaaatatcccttagcaatcgtgttccccagagccaccaactccgttttatgttgcgggtatttttccgcagcatctttcaatgctttttgagttatcaggtgcattcttcatcacgtccgttgacaaattggcaatatgataacatccgttgccagattggcaacggatgaatttatctgtgtgacggaagaataaacgtagaaaaacgctaaacaagagaatgtagacgatggtgacagggattttttgttttatggaagcgcgattccagaactgggcagacattgccggatgcgacgcttgccgcgtcttatccggcctggagtaacgtgctgaacgtaggccggataaggcgtttacgccgcatccggcaggtaactcccaatcttaccgacgacgtcccagcttcaccgctttcagtaccacaaatttattattcgtcgcaatagtggtgcagttgccgaaaatcttcttcagtttatggaagtaatccaggtgacggttggcaacgatatacagctcgccgttgattttcaggcagcggcgggcgtggtggaacatctcccaggcgacgttatcggtcagcgcatgttgttggtgaaacggcgggttgcagagcacagcattaaagcggaaaggctccacgccggagagcgcgttgttgatcataaactcgcagcgatccaacgcctctggcatgttggtttcaacgttcaaacggctggaagcaaccgccatcgggctttcatcgacaaacaccactttcgcctgcgggtttttatcaagcagcgtcagaccaataacgccattaccgcaaccgagatcgacaatctccccttcgagattctctggcagatgttgcataaagaagcgcgcgccgatatcaagcccggtgcgggagaagacattcgcatggttgtggatagtccagtcagtaccttccagcttccagctaacggtctgcggcgcatcggccagctgcggttcattgaaagtgcaattaatcaggcgcgcttttttccatgccagcgtggtggtggttgggccgagcactttttcgaacagttccagcgtggaagtgtgaatgtcacgggccttggcaccggcaataatacgtgtatcgctcgtgaccactttgcgcagcgcacgcagttgctgttccagcaatgccagtgttttcggcactttgatcagcaccacacccggctgttgcgggtagtcggcggtgctgtcgagaaacttcacgctgctctcatcaatcccgttgaggcgtaaattctcgcgcgtcgccagttcactgatgtaactgtcgccaatgctgtacggcttatgttccgccagtgcgcagcttaacgcaccaaaggcatcattcaggatcaacaccgggccgcggatttctgtgtcgtccaactgttgcagcaaatattcatccgccgcttcccacgcctgtagcgggttaacgtcatccgtcgccggaaaacgttgtagtgtcagactacggaaaccgttgtctaagtggctcatcggccctcctgaatgataaaatttcgacattgcccctgaaaagggtgcgtgagtataccctttttctctttttcgtgggcggttatgagcaatcttacttatcttcagggttatcccgagcagctactttcccaggtgcgaacactgattaacgaacagcgtctgggcgatgtgctggcaaaacgctatccgggaacacacgactacgccaccgataaagccctctggcaatatactcaggatctgaaaaatcagtttctgcgtaatgccccgccgatcaataaagtgatgtatgacaataagatccatgtgctaaaaaacgcgctcgggttacataccgctgtttctcgtgtgcagggcggcaagctgaaagcaaaggtggagatccgcgtcgctaccgtgtttcgcaacgcgccggaaccgtttttgcgcatgatcgtggtgcacgagctggcgcacctgaaggagaaagagcataacaaagcgttttaccagttgtgttgtcatatggaaccccagtaccaccagcttgagttcgacacccgactgtggctaacgcagttgagccttgggcagaacaaaatctgaaaatgatgtcaggcgttatcttttctttctttagcgcctaaaatcgacctcccccctttcgttaaggataacgaccatgctgcgcgcatttgcccgccttcttctccgtatttgtttttctcgccggactctaaagattgcctgcttactgttacttgtggcaggagcgaccatccttatcgccgatcgcgtaatggtcaacgccagcaaacagctgacctggagcgatgtcaacgccgttccggcgcgtaacgtgggtttattgctgggggcgaggccgggtaatcgctactttacccgacgtattgataccgcagcagcgttgtaccacgccggaaaagtgaaatggctgctggtaagtggcgataacggacgtaaaaattacgatgaagcaagtggtatgcagcaggctttgatcgctaaaggcgtaccagcaaaagtgatcttctgcgactatgccggattcagtacgctggatagcgtagtgcgtgccaaaaaggtttttggtgaaaaccatatcaccattatcagccaagaatttcataatcaacgcgccatctggctggcaaaacagtacggcatcgacgctatcggttttaacgcgccagacctcaatatgaagcacggtttttatactcaactgcgggagaaactcgctcgtgtcagcgccgtgattgacgccaaaatcctccatcgccagccgaaatatctcgggcctagcgtcatgattgggccgtttagtgagcatggctgtccggcgcagaaataatgcgtatctgcgcacgtcgaagatgaaaaaggcgtgctacattgacgacagaatccctttatggagtatccacgcgttatgatacgtttcgctgtgattggtacgaactggatcactcgccagttcgtcgaggccgcccatgagagcggtaaatacaagttaaccgccgtatattcccgcagccttgaacaggcccagcacttcgccaatgatttttctgtcgagcatctgtttaccagcctggaagcgatggcggaaagcgatgccattgacgcggtgtatattgccagcccgaattccctgcatttttcccagacacaacttttccttagccataaaattaatgtgatttgcgagaaaccgctggcgagcaatctggcggaagtggatgccgccattgcctgtgcgcgggaaaatcaggtggtgctgtttgaggcatttaaaaccgcctgcctgccgaactttcatttgttgcgccaggcgctgccgaaagtcggcaaactgcggaaagtctttttcaactattgccagtattccagccggtatcaacgttacctggatggtgagaatcccaacacctttaatccggcattctctaacggtagtattatggatatcggtttttactgtctggcgagcgcggtggcgttatttggtgagccgaaaagcgtgcaggcaaccgccagtttgctggcaagcggcgttgacgcccagggcgtggtggtgatggattacggtgatttcagcgtcaccttgcagcacagtaaagtcagtgattctgtcctggcgagcgagattcagggcgaagcaggaagcctggtgattgaaaaactgtctgaatgccagaaagtgtgcttcgtgccgcgtggcagccaaatgcaggatctcacccagccgcagcatattaataccatgctctacgaagcagagctgttcgctaccctggtggatgagcatctggtggatcatccagggctggcggtcagtcgcatcaccgccaaactgctgaccgagatccgccgccagactggggtgatttttccggcagatagcgtaaaactataattgccaaagtaaaacagtgtaaaaggtatgtaacagaccattgactggctgaatggtctgtcatactttgttacctgcaaaggggagtaacttcattgccggtcgatcgtcattacgatgtgtgaaaaaacacatccggtcaccgggcaacccgaaaggaatacgcagacgtattccttttttgttgtaagtgagaccttgccggaaggcgaggtctatgcataaaaagcagcggctgacgtcttccgacgttggccgtttttttatgtgtaaggaacttctatgaatactgtcggcacgccgttgctatggggcggattcgctgttgttgtcgccattatgctggctatcgacctgttgttgcaggggcgtcgtggggcacatgccatgaccatgaaacaggctgcggcctggagcctggtctgggtgacgctgagcttactgtttaacgccgctttctggtggtatctggtgcaaaccgaaggtcgcgccgttgccgatccacaggcactggcctttctcacaggttatctgattgagaaaagcctggcggtcgataacgtctttgtctggctgatgttgttcagctatttctctgttccggcggcattacaacgccgcgtgctggtgtatggcgtgctcggggcgattgttctgcgtaccatcatgatcttcactggcagctggctaattagccagttcgactggatcctgtatatcttcggtgccttcctgctgtttaccggcgtgaagatggcgctcgcccatgaagatgaaagtggcattggcgacaagccgctggtgcgctggctacgcggtcatttgcgcatgaccgacaccatcgacaacgagcatttctttgtgcgtaagaatggattgctgtacgccacaccgctgatgctggtactgattctggtggaattgagcgacgtgattttcgccgtggatagcattccggctatcttcgccgtgaccactgacccgttcattgtgctgaccagtaacctgtttgcgatcctcggcctgcgtgcgatgtatttcctgctggcgggcgtagcagagcgtttcagcatgctcaaatatggcctggcggtgattctggtgtttatcggtatcaagatgctgattgtcgacttctaccatattccaatcgccgtcagcctgggcgtggtgtttggcattctggtgatgacgtttattatcaacgcctgggtgaattatcggcatgataagcagcggggtggataatttttaatctgcctaagccgtgtaccctgtcattaacatgagcaccgttttctccctctcccttccagggagagggtcggggtgagggtaatttttcgcaccgatgctggcctgttcccctcaccctaaccctctccccaaacggggcgaggggactgaccgagtccttttttgatgttgtcatcagtctggaagccgcacgttggctttatttttatgtcaaagaaatgtaaccattaagtttcaaaatatgacctctctttaaaatccagcatttttcgcttcccgaagctgtaactttccttatactcgaccttgcaaacactttgttacatcctgaaagatgcgtcgacagaacgcaccagggatgtgcgacaacacaatgaaaggatcgaaaaatgactacgcaacgtagtccggggctattccggcgtctggctcatggcagcctggtaaaacaaatcctggtcggccttgttctggggattcttctggcatggatcagtaaacccgcggcggaagctgttggtctgttaggtactttgttcgtcggcgcactgaaagccgttgcccccatcctggtgttgatgctggtgatggcatctattgctaaccaccagcacgggcagaaaaccaatatccgccctattttgttcctctatctactgggcaccttctctgctgctctggccgcagtagtcttcagctttgccttcccttctaccctgcatttatccagtagcgcgggtgatattagcccgccgagtggcattgtcgaagtgatgcgcgggctggtaatgagcatggtttccaaccccatcgacgcgctgctgaaaggtaactacatcgggattctggtgtgggcgatcggcctcggcttcgcactgcgtcacggtaacgagaccaccaaaaacctggttaacgatatgagcaatgccgttacctttatggtgaaactggtcattcgcttcgcaccgattggtatttttgggctggtttcttctaccctggcaaccaccggtttctccacactgtggggctacgcgcaactgctggtcgtgctggttggctgtatgttactggtggcgctggtggttaacccattgctggtgtggtggaaaattcgtcgtaacccgttcccgctggtgctgctgtgcctgcgcgaaagcggtgtgtatgccttcttcacccgcagctctgcagcgaacattccggtgaatatggcgctgtgtgaaaagctgaatctggatcgcgatacctattccgtttctattccgctgggagccaccatcaatatggcgggcgcagcaatcactattaccgtgttgacgctggctgcggttaatacgctgggtattccggtcgatctgcccacggcgctgctgttgagcgtggtggcttctctgtgtgcctgtggcgcatccggcgtggcgggggggtctctgctgctgatcccactggcctgtaatatgttcggtattagcaacgatatcgccatgcaggtggttgccgtcggctttatcatcggcgtattgcaggactcttgcgaaaccgcgctgaactctagtactgacgtgctgttcactgcggcagcttgccaggcagaagacgatcgtctggcaaatagcgccctgcgtaattaattgtttaacccctttcgtctacggcggaaggggttttctcaactttaaacggatcaattccccttttctgcatccgccagaaacgaatgatattcaggccattcataagcagaaaactaccctcaatcatcgtgccgcctatgctccccgcccagaagttgtgaatcacccagcaacacgtactaaaccacattacgcagcgcatggtcagccctttacagcagaatagcgcccaggtactgacaatcgtgccgataaccggcaatagttcgacaggatgatggaacttcgcgaggccaattccgccagtcagcacaataaaaatcgccattacccataagctgcgcgtgcgtaaggtaatcaatgtacgaatggcattaaggatggcactggcaccagcgggataggtgcccagaagaaaaaaatgtacgccaataacggcgctatagacgctaagctgctttttgaagcgacgttcgtcacgattgaaaaatgttgtgataccaatcagaaaggcgatgacacccacgccctgggccagccaatacgcggtcatgataaatccttagcaggtatggaaaagcaaacggcgcttcacattatgaaacgccgttttttattaacaactcatttcgactttatagcgttacgccgcttttgaagatcgccagttcgcggaagtcgttacgctcgttacaggtttgcttaccgttggcaaactcaacgatggtgtcgataaattcttccagcaactgcggcatcgctttaccgtggatcaactgacccgcgtcaaagtcgatccagtgttttttcttcgccgccagttcactgttggtggcgattttcaccgtcggcacaaatccaccatacggcgtgccacgaccagtactgaacagcaccatatggcagcccgcacccgccagggcgctggtcgctacggcatcgttacccggcgcacttaacaagttcagccctggcgttttcagacgctcgccgtaacgcagcacgtcaaccacgacgctggaacccgctttctgggtacagccaagacttttgtcttccagcgtggtgataccgcccgctttgttccccgggcttgggttttcatagatcggctgatcatgggcaataaagtactgtttgaagtcgttgaccatggtgaccagtttttcaaacgttgcttcgtcgcggcaatggtccatcagcaactgctctgcgccaaacatctccggcacttcggtcagtacggtagtaccgccgttagcaatcacgtagtcagagaaacgccccagcatcgggttagcagtaataccagaaagaccgtcagaaccaccgcactccagaccaaacttcagttcgctgagtttgcctggctcgcgtttatcgttgcgcatcacgttatacagctgatgcaaatgctcgattccggcttcgatctcatcatcctgctgttggcagatcatgaaatgaacgcgttcaggatcgatatcgcccagcgtttcacggaatgcggcaacctggttgttttcacagcccagaccaatcaccagcactgcgcctgcgttcgggtggcgcaccatgttttgcagcatggtgcgggtattaatgtgatcgtcgcccagctgactgcagccgtaggtgtggctgaagaggaacacgccgtcagtaccttcggcgttgttggtctctttcagaaaacggttctggatctgccgcgcgatgccgttgacacagcccacggttggcaggatccacagctcattacgcaccccgacatcgccgttagcgcgacgatagatctgcacttcacgatctgccgcttgcgcaggcagatcctgaaaatcaggttgatagcgatactgatccagatcgctcagattcgtgcgcgtattgtgggcgtgaacgtgaacacctgccgcaatatccgccaatgcataaccaatcggcaggccatatttgatgacattggccccttttgcgatatccgttaacgcaaatttatgtccacgagcaacatcctggcgcagcgtaacagtctggttatcgacactgacttctgtgccttcagccaaatctgctaaagcgaccgcgacgttatccagcgcatggatcttgatgtattgcatatcaaccccagaccttagttcagttcaatggcgaagtagtcacgcgcattgttaaagcaaatatttttcaccatctcgcccagcaggttgatgtccgccggtgcttcgcccgcttccacccagcgaccgatcatctggcacagaatgcggcggaagtattcgtgacgggtgtaactcaggaagctacggctgtcagtcagcataccgacaaagcggctcagcagaccgagctgcgccagttgggtcatctgacgttccataccgtctttctgatcgttaaaccaccagccggaaccgaactgcattttgcccggcataccttcgccctggaagttaccgatcatggtgcccagcacttcgttatcgcgcgggttcaggcagtacagaatggttttcggcagcaggttttcttcattctgcttgctcagcaacttagacagctcttccgccatcggacggtcgttgatggagtcaaagcctacatccggccccagcagtttgaactgacgcaggttgttattacgcagcgcgccaatgtggtactgctgtacccagccgcgacgtgcatattcggcaccaaggaacaccagtaccgcagttttgaactgcgccacttcgtgctcgctcagggtttcgccagccagacggcgcgccagaatgctgtccagttccgcttcgttcgcttcagcaaacatcaccacatccagcgcgtggtcagacactttacagccgtgagcggcgaagtgatccagacgtttggtcagggcagtttgcaggtcagcaaagcggcgaatgtcggtatcggaaacttcgcccagcttcgccatgtagtcgttaaaggtcgcctgttcgatgttgaaggctttgtccggacgccagctcggcagcactttgatggtgaaagagccgtctttggcgatctctgcgtgatgctccagagaatcgatcgggtcatcggtggtgccgaccattttcacgttcatctgctgcatgatgccgcgcgcggagaagttatcctgcgccagcagttcgttacattcgttccagatttcatcggcagtactcggagaaagcaatttgccagtgataccaaacggacggcgcagttcgaggtgcgtccagtggtataacgggttgccgatagtgtgcggaacagtcgccgcccaggcgtcaaatttttcacggtcagacgcatcaccggtacacagacgctcggccacaccgttggtacgcatagcgcgccatttgtagtgatcgcctttcagccagatgtcatacaggtttttaaaacgatagtcttccgcaatctgctgcggcggcaaatggcaatggtaatcgaaaatcggctggtcttttgcgtagtcgtgatacagacggcgggcaaattcggtatctaacaggaaatcttcagtcataaacggagtcattttcgtcttcctctcaacgagtgagctagcttgcttatggtgcgatgctgacaaagttatcacaccaatttccagagtccgaagatattttcgtgagttagatcaataaacgtagttaaaaaaattactctcaaagtggtaaatctcgctgcaggccgcgccagtactggccttgctgtcgtcaggtaatgtccctacaaatattcccacatttgtgatggctctcaccttttaaagttgtatgacaagttatctttctgccgtcgcaaatcataagtcgacggaatgcaaattgccgattcattcatttgttagatgaatcgggttaaccggtacggaagccgaattagcacgaaactttcatggcaacgttcggggcgtgccggttttttttcggttacccggtcgtaactaacatcttcagcctctggcgggatgatggccgcgcttcctgcggatataacaaaacgatgaggttttacatgcgtaaaattaaagggttacgttggtatatgatcgcactggtgacgctcggcaccgtgcttggttacctgacgcgtaacactgtggcggcagctgcgccaactctgatggaagagttaaacatctccacccaacagtattcctatatcatcgcagcctattctgctgcttatacggtcatgcaaccggtagcaggttatgtactggatgtgctgggtacgaaaatcggttatgcaatgtttgctgtgctgtgggccgtgttctgtggtgcaaccgcgctggcaggtagctggggtggcctggctgttgctcgtggtgcggtcggtgccgcggaagcagcgatgatcccggcgggtctgaaagccagctccgaatggttcccggcgaaagagcgttccatcgcagtaggctactttaacgtaggttctagcattggtgcgatgattgcgccgccgctggtggtatgggcaatcgtaatgcacagctggcagatggcatttatcatctccggtgcattgagctttatctgggcgatggcatggctgattttctataaacatccgcgcgaccagaagcatctgaccgatgaagaacgcgactatattattaatggtcaggaagcccagcaccaggtgagcacggcgaagaaaatgtccgttggtcagatcctgcgtaaccgtcagttctggggtatcgcgctgccgcgtttcctggcagaaccggcctggggtacttttaacgcgtggatcccgctgttcatgtttaaagtttacggctttaacctgaaagagatcgcgatgttcgcctggatgccgatgctgtttgctgacctcggttgtatcctcggtggttacctgccgccgctgttccagcgttggtttggtgtgaacctgatcgtttcccgtaagatggtcgtaacgctgggtgcagtgctgatgattggcccgggtatgatcggcctgttcaccaacccgtatgtcgcaattatgctgctgtgtatcggtggttttgcccaccaggcactgtctggcgcgctgattacgctctcttccgatgtgtttggtcgtaacgaagtggcaacggcaaacggtttaaccgggatgtccgcatggctggcaagtacgctgtttgcgctggttgtcggtgcactggctgacaccatcggcttcagcccgctgttcgcagttctggcagtgttcgacctgttaggtgcgctggttatctggaccgtgttgcagaacaaaccggcgattgaggtggcgcaggaaacacataacgatcccgcaccgcaacattaacgtttcgtgtaagttttagtttcccttcaaagccgccttctcaggcggctttttcatcactgcgagtagagctaaactcgcaaaagtggtataacaaatatagtctgccgtatcatgcctggagcgcatatggaaatcactgaaccacgccgtttgtatcaacaacttgccgctgacctgaaagagcgcatcgaacagggcgtctatctggtgggtgataaactgcctgcagaacgctttattgccgatgaaaagaacgtcagccgtacggtagttcgtgaagccatcatcatgctggaagttgaaggctatgtcgaagtgcgtaaaggtagtggtattcatgtggtttccaaccagccgcgccatcagcaggcggctgacaataatatggaattcgccaattacggtccgtttgagttgcttcaggctcgccagctcatcgaaagtaatattgccgaattcgcggcaactcaggtaacgaaacaggacatcatgaaactgatggccattcaggaacaggcgcgcggcgaacaatgcttccgtgattccgagtgggatttgcagttccacattcaggtcgctctggcgacgcagaactccgccctggcggctatcgtggaaaaaatgtggacccagcgtagtcataacccgtactggaaaaaactgcacgaacacattgattcccgtaccgtcgataactggtgtgatgaccacgatcaaatcctcaaggcgctgattcgcaaagatcctcatgctgctaagctggcaatgtggcagcatctggaaaacaccaagatcatgttatttaacgaaaccagcgacgacttcgagttcaatgccgaccgctatctattcgccgaaaacccggtggtgcatctcgatacagccaccagcggcagtaaatgaaattcctgtccgacaggcgctgcaatgcgcctgtttgtctcgtcggtaagcgaaaagtataaagtgtcagcctgtgtaaatcctctcgccaccctcccctgcattcagcaaaatcagactccacggacatgtaattttgataacgaacaacgttgacctttgttacaattagattcaatttgaatttatgtttttgaatgctttcttatctcacgatttaacagggaatagttcaggctgtgttgatgtatcaaacccgcagaacataccaaaacagcaataacattgcggtagtgcatcttttaaaaccagcgtggcgttaaccgattcaccaggaataatgaatggaacttttgacccaattgctgcaagccctgtgggcgcaggattttgaaaccctggccaatccaagcatgattggcatgttgtattttgtcttgtttgtaattttgttccttgaaaacggcttgcttccggcggcctttttaccgggcgacagtttactggtattggtcggcgtgttgattgcgaaaggcgcgatgggctatccgcaaacgattctgctgctgaccgttgccgccagcctcggctgctgggtcagctatattcaggggcgatggctgggcaatacccgcaccgtacaaaactggctatctcatttacccgcgcattatcatcaacgcgcacaccatctttttcataaacacggtttaagcgcgctgttaattggtcgctttattgcgtttgtcagaacactgctgccgacgattgccgggttaagtgggctgaataacgcgcgctttcagtttttcaactggatgagcggtctgctgtgggtattgatcctgacaactctgggttacatgctcggcaaaacgccggtatttttaaagtacgaggaccagctgatgagttgcctgatgctgctcccggtggtgctgctggtgtttggcctggcaggttctctggtcgtgttatggaaaaagaaatatggaaatcgggggtaagggatgcaaatacctcgcatgagccttcgccagctagcctggtccggcgctgttttacttctggtcggcacgctgttgctggcctggtccgcggttcgccagcaagagtctacgctggcgattcgtgccgttcatcaaggcacaacgatgccagacggttttagtatctggcatcaccttgacgctcatggcattcctttcaaaagtatcacccccaaaaacgacactctgttaattacatttgactccagcgaccagagcgccgccgcaaaagcggtcctcgacagaacattgccccatggctacatcattgcgcagcaggacaataacagtcaggctatgcagtggctgacccggttacgggataactctcatcgcttcggataacttcctgttatccgaaacatatcactcactttggtgatttcaccgtaactgtctatgattaatgaggcggtggttaacactaccgcttcgttgtctggacaatcgttcctttgtaataggtccgaatcacaatggaaggttcaagaatgaaataccgcatcgctttagctgtttctctctttgctcttagtgccggtagttatgccactaccctgtgtcaggaaaaggagcaaaatatccttaaggagatcagctatgccgaaaaacaccaaaaccagaatcgtattgacggtctgaataaagccctgagtgaagtccgggccaactgtagtgatagccagctgcgtgccgatcatcagaagaaaatcgcaaagcagaaagatgaggtggcggaacgccagcaagatttagccgaggcgaagcaaaaaggcgatgccgataagattgccaaacgcgaacggaaactggcagaagcgcaggaagagctgaaaaagctggaagcgcgcgactactaactcacaatagtcactacttactcacctggagaaaactatgagcaaagaacacactacggaacatctgcgtgctgagttgaaatccctttccgatacgctggaagaggtgcttagcagttctggcgagaagagcaaagaagagttgagtaagattcgtagcaaagcggagcaggcactgaaacagagccgttatcgcctgggtgaaaccggtgatgccattgccaaacaaacccgtgtcgcggcggcgcgtgccgatgagtatgtgcgcgaaaatccgtggacgggcgtgggcattggcgctgcaatcggtgtagtgctcggcgttctgctgagccgtcgttaattatggcggacactcatcacgcacaagggcccggtaaaagcgttctgggcatcgggcagcgaattgtttctatcatggttgaaatggtagagacacgtctgcggctggcggtggtggagctggaagaggaaaaagcgaatctctttcaacttttactgatgctgggcctgacgatgcttttcgctgcatttggtcttatgagcctgatggtgctaattatttgggcggttgacccgcaatatcgcctgaatgcgatgattgccaccaccgtggtgttgctgctactggcactgattggcggtatctggacgctacgtaaaagccgtaagtctacgttgctgcgccatacacgccatgagttagcaaacgatcggcagctgctcgaggaggagtcccgtgagcagtaaagtcgaacgtgaacgacgtaaggcgcaactgcttagccagatccagcaacaacggctggatctttccgccagtcgtcgtgaatggctggagacaacaggcgcttacgatcgtcgctggaatatgctgctaagtctgcgctcctgggcgctggttggcagtagcgtgatggcgatctggacgattcgccatcctaatatgctggtccgctgggccagacgcggttttggcgtatggagcgcctggcgtctggttaaaacgaccctcaagcagcaacagcttcgcggttaacttccctctggccggagccattccggccttatccctcaaattttttgaagatttttgacagttttccttgctaacaatcatcattcaccacgtttatgattctctccatcgacagcaacgacgctaataccgcgccattgcacaaaaaaacaatcagcagcctgagtggcgcagtggagagtatgatgaaaaaattagaagatgttggtgtactggtagcgcgcattttaatgccgattctgtttattaccgctggctggggaaaaattactggctacgcgggtacccaacaatatatggaagcaatgggcgtcccgggttttatgctgccactggtgattctgcttgagtttggtggtggtctggcaatcctgttcggtttcctgactcgcaccacagccctgtttactgcgggctttacgctgctgacggcatttttatttcacagcaactttgctgaaggcgtcaacagcctgatgttcatgaaaaacctgacaatttctggcggattcctgctgctggcaattaccggtccgggcgcgtatagcatcgaccgcctgctgaataaaaagtggtaagcacgcgctatacttaacgataaaaaacgaggaggaagctcctcgtttttgctattggaggagagaaaaatgggtcaactgattgacggcgtctggcatgacacctggtacgataccaaatctaccggcggtaaatttcaacgtagtgcttccgcatttcgtaactggctcactgccgatggcgctcctggccccactggcacaggcggttttatcgcagagaaagatcgttatcatctctatgttagtctcgcctgcccgtgggcgcaccgcacgctgatcatgcgcaaactcaaaggactggaaccgtttatttccgtttccgtagtgaacccgctgatgctggaaaacggttggacctttgatgacagttttccgggagcaaccggagacacgctctatcaaaatgaatttctgtatcagctttatctccacgccgatccacactacagcggacgagttactgttcccgtgctgtgggacaaaaagaaccacaccatcgtcagcaacgaaagtgcagaaatcatccgcatgttcaataccgcgtttgatgcgctgggcgcgaaagcgggtgattactaccctccagccctgcaaacaaaaattgacgaacttaacggctggatttatgacaccgttaacaacggcgtgtataaagctggttttgccaccagccaggaagcttacgacgaggcggtggcgaaagtgtttgaaagcctggcacgactggagcagattttaggccagcatcgttacctgaccggcaaccagctaaccgaagccgatattcgcctgtggactacgctggtgcgttttgatccggtgtatgtgacccacttcaagtgtgataagcaccgcatcagcgattacctgaatctgtacggttttctgcgcgatatctaccagatgccggggatcgccgaaacagtcaatttcgatcatatccgtaatcattacttccgcagccataagaccatcaaccctacggggattattagtattggtccgtggcaggatctcgatgaaccgcatggacgagatgttcgcttcggttaaaaaaaggcaccttacgaggtgcctctgataattagctaagtgcatgttgttcatgtcggatgtggcatgaacgccttatctgacatacaaaacattgtacattcaatagattgcataacccgcgcagaccagataagcgtagcgcatctggcgattttgcgcttgtcatcagtcttagcgcgccttcacggcactttattaattccttgaacgaatatttactgccatttcattcacgtctattcttaatttgctgctttaaaaacaagtgattgagcaaaattgaggcaaaaatggactggtatctgaaagtactaaaaaattatgtcggtttccggggtcgtgcgcggcgcaaagagtactggatgtttattctggtcaacatcatctttacgttcgtgctggggctgctggataaaatgttaggctggcaacgcgctggtggcgaaggcatcctgacgacaatctacggtattctggtgtttttaccgtggtgggcggttcagttccgccgcctgcacgacaccgaccgcagcgcgtggtgggcactgctattcttaatcccgtttatcggctggcttattatcatcgtctttaactgccaggcgggtacgccaggcgaaaaccgctttggaccagatccaaaactggaaccttaaaacaaatctgctcgccggatgtctgactcatccggcttttatcattatgttgatgaatgaataatttactaatgtttatttaaaatatttcaatgtcgttatataaattacctataaaaaataaccatgtatttatcttaaatatcaaaacctttataacatccgaaaaagaaagatacgaatagcatttacacaatacccggaatagactttcgtcacttttaattaaagggatgtttttatgcagtggtatttgtccgtattaaaaaattatgttggtttctctggtcgcgcacgtcgtaaagagtactggatgtttactctgattaacgccatcgtcggcgctattatcaatgtcattcaattgattttaggtctggagcttccatatctgtctatgctttatttgctggcaaccttccttcccgtccttgcgcttgctatccgtcgcttacacgataccgaccgtagtggtgcctgggccttgctcttttttgttccgtttattggctggctcgtgcttctggtttttttctgcacagaaggtacttctggcagcaatcgttacggaaacgatccgaagtttggtagtaattaatcttagaattggggcgatatttcgcccctttttattaacaataataaatattattttccgttaaaaagtttgggaatttcccgcagacaccaggatttcgcttcccccatactgtcacgacgccaggccataataatatcgatctcgctggtgctttccgggctgacgacacgcaaccgcccttccgcaatatctttttcgaccataggatacggcatcgtcgccacgccaagccccgccagtaatgcctgacgtttatcttcaatcgtgctcaccgttaagcgcggctgtttgtccagcagctgtacggtcaacaccgggcgctcacgagcggtatccgccaccgcaattccacgatatttcacacgcgtcacttcagataacggttccggctcctgatgaatcgggtgatcaggcgcggcaacgtagacgttcattaacgtatagagcttgcggctgttgatctcgctgctggaacgaaaatgcatatccggcgcgataacaatatccgcccgcccctgctccagccgttcccacgcccccgccagcacttctgtgatgattgccagttgggtattggcttttgccgccagtttgtcgattaacgggaaaaaggcaggtgtcggtaccagcgcttcggtcacaatggtgagatgcgtttcccaaccgcgcgcgagagcttccgcatcagtagtcagtttatctgcggcttccagcaaaacgcgccctcgctccaacaacatcctcccgacattggtgaatttggtacgatggccgctgcggtcaaacagcaccacatccagctcttcttccagtttttgcatggtgtagctaagtgcggaaggcacgcgtcccagctcatccgccgccgccgcaaaactgccccggcgatcgatcgcatccataacccgtagtgcttccagcgttaatgccctttctttggccatttcgttctcattcaggaaatttgaacataccgggcagaatatctggctaacaatgtagcgtccagccccttaccataaaaggaagtaaagagaggtcaagaattatgattactacccgaactgccaggcagtgtggacaagcagactacggatggttgcaggcccggtatactttttcctttggacactacttcgacccgaaattgttaggctatgcctccctgcgtgtgcttaaccaggaagtgctggccccaggtgccgcctttcagccgcgaacctatcccaaagtcgatattttaaatgtgattctggatggagaagcagagtatcgcgatagcgaaggcaatcatgttcaggccagcgccggagaggcgttgctgctctctacccagccgggtgtcagctatagcgaacacaatctcagcaaagacaaaccgttaacgcgaatgcagctttggctggacgcctgcccgcagcgagagaatccgctgattcaaaagctggcgcttaatatgggcaagcagcaattaatcgccagcccagagggtgcgatgggaagcctgcaattacgccagcaagtgtggctgcaccatatcgtgctcgacaaaggcgaaagtgcgaatttccagttgcatgggccacgcgcgtatttgcaaagcattcacgggaaatttcatgcgcttacgcatcatgaagagaaagcggcgctgacctgcggtgatggggcgtttattcgtgacgaggctaacattacgctggttgccgattccccactgcgcgctttgctgatagatttgcctgtctaattgtttttacagggagatgatgatgagtaaaaaattggccaaaaagcgccagccggtgaagcccgtggtggcgaaagaacctgctcgcaccgccaaaaattttggctatgaagagatgttgagcgagctggaagctatcgtcgcggatgctgaaacgcgtttagccgaggatgaagctaccgcgtaaagacaggttgccggatgcggcgaaaacgccttatccggcctacaaaatccaacaacattaacgaattaaacaacccgtaggccggacaagatgcgccagcatcgcatccggcacgatccccaaaacctggcgtttatctggccttgctcgccataatctcgataatctgccgatccgtttgctgcatgctatggcttgctaacgcacacaggttggcaatgctctgctcaacatcatgcgccacaatcccttcattgccggtcacggcggtatcatccagcgccattaacaccgctttccacgcagcgctagcactggtgctaaccttcatcgcgcagctgttgctcgcaccatcgcaaatcatgccgctgacatcgccgatcatactgctgatcgccatgctgatggtttcataacgcccatccaccagccatgccatcccggcggcggcccccattgctgcggtcgttgcggcacacagcgcagacaaacgcggtaactggttatggatgtaaattgcgctcaaatggctaagcatcagcgcacgcgccagccgttcatcatccgctccgaagtgttctgctaccaccaccacaggcattgttgcggtaatcccctggttaccgctgccggagttactcatagccggaagcgtagcgccgcccatacgcgcatcggatgccgcgctggtacgaatcacaatggaactagagagatctttcgccagcaaaccgcgctcgcactgtttttccagcgtcgcgccaatatgcagcccccacttaccgctcaaaccttcctggcttaacgcacaatttagcttcgcggaatcgagaataaagcggatcgccgcaaacgggacttcattgacgaacttcaggatctcagccagcgtcgttctggaaagcaccgtcagcggagactcttgctcgccctctgccacacacgcctgctgggtaaacaccacaccatcgtgcgtctcgatatgcacaatgttggtatgcccgccgacgatggtgacacacgcccacttctcaccgttccagactttggcgcgactgaagaggatttcatcgcaaggttcctggatcttaacggagactttccccgccgccagcagtgctttggcatcggcaattgcctgcgctgttgcgtctttcagcacttccagcccggcgttggcatttccacctaacgcccccagcgccgccgcaatcggcagccccaccattcccgtgccgggaacggtgacgcccagaccgttcttcatcagatttgggctaacccaggcttctacacgttcaaccggaccttccagttctgccgcagcaaccgccgccgccagcgccagactaatcggttcagtacatcccagcgccggttttacttcctcctgaacggcgaggatgtaacgctgccataacggatttaaagtgctatcaaacatattaaaaaccttaaaatttcaggtaaatcaagaaaatgccaggaacggagaaacacacagcaacaaaccagtgacgataatcaggtacagagacatccctttgtatttgtgcaatgctggtactttgtaaaccagccacgccgggatcaggcaccctaccatgccgaaaatcgggctacagatagaggtgaagctcaacaccggtgcgttcagtacgatggcgctccaggccagcaaaatggcgaaaatcatgatgccgcgctgaacgagattttcgttaatcttctcggcaggcatcttgcgacgcaggatgttcattacgatcccttgcgttgcttcgcgaaagcctaaatagacgccaaagaatgcagtcatgacagcaaagatattgagaatgacgctgaccactttcacccacgctgcgccgtcaccgctaataaactgtgcggcaatcgccagcgcggaaatattctgctcataggcttttaccgcttcgtcatgtcccatcgccagcgtgaagctcacggcgtagaaaaagacggtgacaaacaaaatgccaaacgcgatattcattgcccgcaatgctttatgccgcgccacttcaatacttttttcccggctgcgataagagatcaccatcggacttaacgtctggataaacagaatgctcgtcagggtaaacggcagcgtaataatggcgtttttcaccagcagccccagcggcggtaggctaccgacgttatacagatgccacattcccaccatgctcacgcccagcgccgcgaccaccagcagcttggtcagcaccatgccggtgctaattttgaataacaatttctcgccgcgactggagatcgccaccagaatgcaaatcagtaccagaccataaaagggactgtcactcagcaacccttccgtcacgccgaaggtatgcaggtaggaagcactatcgttggtgatggcggtggaatagacgaacatccaaatcaccagcattacgaaatagagcgcacctaacaggatgccccagtttttacctaaataaccgctaatgacgctcgggtaatctttacattctggactttctgccagcgtattaataaacaatcgctgaaacagatacattgccgggtaaccaatcacgctactgagcaaaaatacccacaatcccatcaaaccgacctgcaccgggagaaaaacaatccccgcgccaatcgccatcccgatactcataatcacccagccggtgtcagtactgtcgaatttgatcgcttctcgccactcgctctcactcattccagcacgacccgccggggtcgaagcgtctgcaatgacgcctttattcgatgcaatttccataatttctcgctcaatattttgtagggcttattatttttttccgagccgcatcaaggcgatatgcggtctacgtttttgcaggcgagttattagaataaagaaatgatacgcgcgaggtcagagaaaatcttcacaatcaagactttgaaataacggagatggataagaattttctactaaattaatcgcaggagaatattcattctctatttgcggcagatcacaaaaaaaaggtgcacatttgtgcacccaaggatgaaagctgacagcaatgtcagccgcagaccactttaatggccagtcctccgcgacttgtttcgcggtatttatcgttcatatctttgccggtttcatacatcgtctcgatcactttatcgagactaacacgcggtgcgctggtgcggcgcatcgccatccgcgcggcgtttactgctttcacggcattaatggcattacgttcaatgcacgggatttgtacctgtccggcaaccggatcgcaggtcagcccaaggttatgctccatcgcgatttccgccgcattgcatacctgcgccggactgccgcccagtagttcagttaaccctgccgccgccatactacaggccacgccaatctccccctgacagccgacttccgcgccagagatggaggcgttcattttatacagcgcgccaatagcccccgcggccagaaaatagcgggcaatactccgctcgtttaccggacgacggaacttatcgtaataagccagtactgccggaataatgccgcacgcaccgttagtcggtgccgttaccacgcgcccgccagctgcgttttcttcactaaccgccagcgcgtacatgttgatccagtcgatgacattcatcggatcgttagagatgttatcgctggaaaccagctgacgacgcagcgctacggcacggcgcggcacattgagcggaccaggcagcacgccttcagtgttcatcccacgttcaataccgtcatgcatcacttgccagatacgggcaaaaccggcgtcaatttccgctttgctgcgcagcgctagctcgttgtgcatcatcagaccagatatagacaggccgttgtaatcacacattttcagcagttcacctgcactgtggaaatcgtaaggtacggacgtttcgacatcgtggctcaggccgaagtgttcttcttcgacaataaacccgccgccgacagagtaataggttttacttaatagctcttcctgtcccttccaggcagtgatccgcattccgttctcatggcgaggcaacatttcgggatggaagataatgttctttgctacaggaaaatcaacaatatgcgcaccagatgccactggcagccgcccgctgcgcgttactaactctataaatgcagggatctcatcaatgacaacatcctgcggactgtttcctgccagtcccatgatgatggcgacatccgtggcatggcctttgcccgtcagactcaagctcccgtacagatcgaccacaatatggctcgtcgcggttaataagccgctactttccagccgatcaataaaactttttccggcattcattggccccacggtatggctactggagggaccaatcccaattttgaaaatatcgaatgcactaatcatatccacaccctcggattgccgttcagtgaagtggagcggaacgaccttacgaccgtcccgctcacgaggctttacgcactacgtactgcgatggcttcaatttccagcttcacatctttcggcaaacgcgcgacctgcacacagctccgggtcggataggtcgcctgatgctcatcgaagaactgcttatagacttcgttgatggtggcaaaatcattcagatcggtgataaacacggtcatcttgatgatatcgcccacgctcagcccggcagcaaccacgatcgctttgacgttttcgaggcttaaacgcgcctgatcttgcacatcagccgggatctcaccggtctgtgggcaaaccggtatttgcccggaggtgaagaccatgctgcctaaatcaacgccctgaacataagggccgattgcgcctggggcacgttgcgtttcgataatctttttcatacatcctccggcgtcagagcgcctgggtaaaggtacgactaataacatcctgttgctgttcacgggtcagtgcgttgaagcgcacggcgtagccagagacacggattgtcaggttaggatatttttccgggtgctcgatggcatccagcagcatttcccgattcattacgttgacgttgaggtgttgaccgccttcgacatccgcttcgtggtggaaatacccatccagcaggccgacaaggttggttttacgtactggatcttctttgcccagcgccgcaggaacgatactgaaggtgtagctgatcccatctttggcgtaggtgaacggcagtttcgccacgctcgtcaaactggccacggcacctttgcggtcacgaccatgcatcgggttagcgcccggcgcgaacggtgttccggcgcgacgaccgtccggcgtattaccggttttctggccgtacaccacgttagaagtgatagtcagaatgctctgggtagggacggcgttgcgataggttggcagcgctttaattttcttcataaagcgttcaaccaggtcgcaggcaatgctgtctacgcgctcgtcgttgttgccgtactgcggatattcaccgtcgatttcaaagtccaccgccaggccgttttcgtcacggattggtttcacgcgggcatatttgatggcagacagggagtccgtcgccacgctcaggcccgcgatgccgcatgccatagtgcgatagacatcacgatcgtgcagcgccatcaggctagcttcgtagctgtacttgtcgtgcatgtagtgaatgatattcagcgcgctgatgtactgcaccgccagccagtccatgaagtgatcgaggctgtccatcactttgtcgtaatccagcacgtcgtccatcagcggtgctgttttcggcccgacctgaatcttcagcttctcgtccaccccgccgttaattgcgtagagcagcgttttcgccaggttagcgcgtgcaccaaagaactgcatttgcttaccaatcaccattgggctgacgcagcaggcaatcgcgtaatcgtcgctgttgaagtcagtacgcatcagatcgtcattttcatactgcaaggaagaggtgacgatgctcacctgcgcggcatattttttgaaggcaatcggtaattcttcgctccaaagaatggtcaggttaggttccggtgccggccccatagtgtgcagggtgtgcaaatagcggaaggagtttttggtcaccagcgtacgaccgtccagccccatcccgccgatcacttccgtcgcccagattgggtcgccggagaacaggctatcaaattccggtgtacgcaggaagcgtaccatacggatcttcatgatgaagtgatcgatcagttcctgtgcctgctgctcattgagtacgccagctttaaagtcgcgctcaatgtagatatcgaggaagcttgccgtgcggcccaggctcatcgcgccgccattttggcttttcactgccgccagataagcgaagtagagccactgcaccgcttcctgcgcattctgcgccgggcgagagatatcaaagccatatttcgccgccatttcctgaatctgcaacagcgcatgacgatgctctgccagctcctcacgcagacggatggtggcttccagatcctcgcctttttccagacgagactggagatcggcaaattgcagttcgcgttcacgtaccagataactgatgccatacagcgctacgcggcgatagtcaccgataatgcgcccacggccatagccatctggtaaaccggtcagcacgccagatttacggcagcgcagcatatccggactgtaaacatcaaatacgccctggttatgggttttacgcagatcggtaaacagatattcaaattcactgtccatttctcggccataggcgtggaaactacttttaatcatattaatgccaccgaacgggtgtagcgcacgtttcaacggcgcatccgtttgcaggccaacaattttttccagcggctggttaatatatcccgcatcatgagcggtaattgtggtggcaatattggtatcgaaatcaaccggcgcgtgggttgcattttcgatacggatgccttccattactttttcccacaattccgtggtggcaggcgtcgcttcggcgaggaaagattcatcgccttcatacggtgtatagttatgttgaataaaatcgcggacattaatttcgtttttccagtccgtacctttaaagccaagccatgcgtcggcgtacagcttatcgctggtatcaatatctaccttcatgaaaaataatctctctacaatacttcaactaaattatgcaaattctgcgggcgcgttaactttgcctaaatgaatggcatccaaagcaatcattttttcttcgttagtcggaataacggcacaaatgacacgcgcattttcactggaaacaattcgctcaccacaggagttagagcgattattcatttctgtatcaatctctaagcctaatacagccaaatgttccatgaccagacgacgaattaagctactattctctcctattccgccggtgaatataattccatccaggcgacgtaaactagctgcgtgtccggcaatatgacgggcaattcggtgaacaaaggttttaattgccagttgcgcgcgttcgtgaccttcatgccaggctttttccagaacacgtaaatcgctagaaagaccggaaatacctaataatccgctctctttattcactacgcgttccaggtcacccaggctctggttggtttggctggcgacccaggacatcgcaccaaagtcgacatcgccactgcgggtacccatcatcaagccttccagcggcgtcattcccatactggtatcaacactctgaccgttgcgaaccgcgcagatactcgcgccattgccaagatgcgccacaaccaggccggagtcatcttccgccagattcagcaggctatgtgcgcgctgggaaacatagcggtggctcgtgccgtggaaaccataacggcgtacacctaactcttcataatatttccacggcaggccgtataaataagcttccggagccatcgtctggtggaaactggtatcaaataccgccacctgagttacgcccggaaataattgctgcgcgctttcaataccacttaaattggcgtaattatgcaggggtgccagtggagaaacgcgacggatattatcaatgacttcatcggtaataatggcggactcggtaaaaatactgccgccgtgagcgatgcggtggccaattaaggccacactgtcatttaaattccgtttttccagttcaaatgcaattgccttcaatgcaccttcgtagctgtggtgagccagcggtgctggctctcccccatttacggataagaatgcattttcgctgttaataccgtcggcaataccactcattaatacttcacagtcgctggcatcgagcacggaaaacttaatgctagagctaccacagttaataaccaaaacaaccggaaattcattcatctcttttctcatcctgagttacggattaaaacagtttgtatacgatgttcaggatggtcagcagaccaatcacggtaacaaacacgttatccagacgaccacggtatttcgccagagacggcgctttacggatggcatacatcggcaacaggcacagcagggatgcgataatcggtgcgcccatggcttcaatcaggtcaaggatgttcgggttggcgtaggcaacaacccaggtggagcccatgatgaagatcatgctgatagtgttcagtttacccaggctcactttagttttgtcgcctttataaccaaacttcaggaccaggccattcagaccttccagcgttcccagatagtgaccgaagaaagatttgaagatagccacgagtgcgatgatggaagccgcatattccagtgtaatcgcgaacgttgttttggtaccggtcatggacgcaaagtggttagccagataagaaagcactggaatattctgcgctttggcttccgccatgttggccggagacagagtaaacaggcagctaaaggcaaagaacatcaccactgcaaccatcagcatgctggcacgagaaatgatttgggaacatttacgttcggtgaagtcgcgaccgaagtctttctcatactcttcacgcttagaaaccacgaaggaagagacgattgggctgaagttaaaggagaaaaccatgatggaaatccccagccagacagtgatcaggataccgtcatgaccggttaagctcaggctaccgaggtcaacctggtcgataactgcagagttccagtaagggatcaggctcaaagaaatcagcaccaggctggcgataaacggccataccaggtagctcatcactttaaccatcagatccttaccaaaccagatgacgaaagccatcagcagcaacaggaacagcgccacaaagccgcgattcagcggtgcaaagccgagctggttttcccagaacgtcataaaggtattggtaatagtaacgccataaatccacagcagtgggcaaatcgcgaagaagtacaggaacgtgataaccacgccgccagttttaccaaaatgctcttccaccgtttccgtaatgttgccggaagggttagagccagaaagacacagacgcgccagcgcccggtggcaataaaacgcgatggggtatgccaataccaacatcagaagaatcgggatcagtccgccaaaacctgcgcggatagggaagaacagcaccccggcgccgattgccgtaccaaacaagcctaacgtccatgtggtatcacttttacgccaggagctttgttttgtctggctggatacaatgctatcactagtactcatatcctatcctcaacgaattaattaagcgtcaacgaaaccggtgatttgagagacgcgagaaagatcgatattgccgccggaaataatactgacggtttttctgttttgaatatattggtctaatttaccgcttaataatgcagcacatgccagagcgcctgcgccttcggtgacgactttattgcgctgaattaaggcaatcatactgtttctgatttcgtcttcgctgaccagcacgatgtcatcgactaattcacgaacgatttcgtaagttaaattacccgggcgggagacatcacaaccatccgccagggtgccggtagttcggtgcgtggttatttctccggagtggaaagaagccgccatgccgtgaacgttttcagactgtacgccaataacacgaatggtcgggttaatagatttaattgccaccgcaataccagcaattaaaccgccaccaccaattggcacaatcacgttatcgacatcatagagatcttccataatttccagaccaatcgttccctggccagcaatcactttcggatcatcgtaaggtgggataaaaatacggccttccatttcgacaatttcgctcactttagcgatagtgtcgttgaagttatcaccatgcagaacgacttctgcggagtagtcgcacgttgccgctactttggattttggcgcaccttttggcatcaccactttaccgtcgatacccagcatcgcgcaggagagggaaaccccttgcgcatggttgcccgcagaacaggccaccacgcctttgcgtttttccgcatcggtcagactacttaatttattaaatgcgccacgaattttaaaactacccgtacgctgcatattttcaaacttcaggaatatttcacctttgcaacgttcactaaaatagttggagcgaggcatgcctgttttataaattcgcccagccagtcgttgtttcgcttcaataatgtcatcaatagcaaccggcagatcgtatgtaatatgcattataaaacctcttcgcctgaattaaatatgtaggtaaccgtaaccgacacctgcaagacagacaggtggattatttatgtttaaataaaaacaaataattaaccaacttctattaattgccttcgtctacacccattataagaactatactctttggctaattccaccaaaacgcttgctgcttttttaatacgataatttttgctccataccgcggcatattgtgccacaggtaatgtttcttcaaccggaatagtaataaattgattagaaccaaaaggactcgtcatatcacaaggaattacagttaagaaatcagcattgagaacaagattataaattgtcacgacactgtcggttttaacgatgttttcaatactgatgccatttctttgtaacgtagtaagcagttcgctgtagtaccccatattagtttgtggcaacacccactgttcgttcttcaagctctccagcgtggtggtgccggtgcatgttcgggacttactggctaccagcacaaactcggactcgaacagcggctcaacatgtaaatcctgaagcttcatttctgcacttaacgtaccaatcgcaaaatccagtcgaccgtcgcggattgccggtaagaagctagacagttgcgcttcatacatagaaacctgcgctttcgggaacacctctttgaacttgttgatcatcccactcataaaagtaaaaccaatcaaactaggaaaaccaaaactgacttccaccaccgcctcagaagacataccgcttatctcattaaccatatttttcatttcacgggtaatggattcggaacgggagagtaacaattgaccggcaggtgttaatgttacaccggtatttttccgcaccactaattccacaccaaaataatcttcaatatcgttaatgattttactgacggccggttgagttaaccctaattcttttgcagcgctgccgatagaaccacttctaatgacttcctgaaagactaccaggtgctgcgttttcggaagaagaatagtgctcataacgacctacgttaattacctcattgacggcatgaagtgtatcaaaatgaaatgaacaggatatgtgcgaccactcacaaattaactttcaatactttccagagtatcgttattacaattaaatacctttaaatatcaacaagttaaagtataaaaatcagcataaaccctgatttttgtcaaaaaaaatgacggggataaccatattttatggcgataacatcattcgttatgtggttaatacaaaaaaggggctgagaccatatttcaagcaattaccggataattaccaggcaaaatttgagttaaatttaatgagcaagttcagtaattttattataaataaaccatttagtgtgataaataatgcggcatgtcacatttttagtcgctatttgttggagaacaaacatttattttatcaatattttaaaattagcaatacatgtattgatcatctcgaacaattgattaacgtcaactttttctcttctgacaggacgagtttttgtgaatgcaatcgttttccataaattcttctcccctcataggcgacgaatagcattttgtgttgaggatcacaaaacgaataattgctgatcgccgcgataaggtcagacaaagacaacaagggaaattttcacagagcttttgatcggcgtaggccacagaatgttgcttcgtttactgtaacgccgggtaaatgagcgttttttgatagtgcgaaagaaccctgcgaggaaaataagcatctattattgtttgtcatgatgacaaggcaggcatcaatgaaaggcttcccaattgcgcatatttttcaccctagtatcccgccaatgcacgcagtggttaacaatcacaatagaaatattgattattggacggtaaaaagaaagtttgcagaaattgtctccaccaatgacgttaataaaatttacagtataagtaatgaactgcggagagtattatctgcaataactgcattgaatttctatcatggcgatgttccttctgtcatgatccgaatccaaccggaaaatatgagtccattcattatagatatttctacaggagaacatgatgattatatcatacaaacattagatgtaggcacttttgcaccttttggtgaacaatgtacttgcagtgccgtcaataaaaaagagctggaatgtattaaggagacgatttctaagtattgtgcaaaattcacccgaaaagaagccatcttaaccccccttgtgcactttaataaaaccagcattactagtgattgttggcaaattctcttttttagtcccgatcattttaataatgatttttattgattatttataaaggataaaataatgttccctgttagtagtattggtaatgatattagtagtgatttagtccgtcgaaaaatgaatgaccttcctgaaagcccaacaggaaataacctcgaagcactagcaccaggtatagaaaaactaaaacagacctctattgaaatggtcactttacttaacacgttacaacctggtggaaaatgcattatcactggtgattttcaaaaagaattagcgtacttacaaaatgtaattctttataatgtcagctctcttcgtctggattttttaggttataacgcccaaattattcaacgaagcgacaatacttgtgaacttaccattaatgaaccgttaaaaaaccaggaaatatccacaggtaatatcaatattaattgcccattaaaagatatttacaatgaaatcaggaggttaaacgtaatttttagttgtgggactggagatatcgttgatctatcctctctggacttacgtaatgtcgatttagattattatgatttcacagataaacatatggctaatactattttaaatccttttaaattgaatagtacaaattttactaatgccaacatgtttcaggttaattttgttagtagtacacaaaacgccacaatctcctgggattatttactaaaaataacgcctgttttaataagcattagcgatatgtattctgaagaaaaaatcaagtttgtcgaaagttgtttaaatgagcctggagacattaccgaagaacaattaaaaattatgagatttgcaattataaaatctataccaagggcaactcttacagataaattagaaaatgaattaacaaaagaaatatataaaagcagtagcaaaatcatcaattgcttgaacagaattaaattaacagagatgaaagaattcagtagtgaaaaaatatatgattacatcgatataatcattgaagattatgaaaataccaaagaaaatgcttatctggtcgtcccccaaattaattatactatggatttaaacatagaagactctagcagtgaagagttacttagtgataataccctcgagaaagacgaaaattctccggacaatggctttgaggtcggggaatataacacatatgaagcatataacagtgagaagcaatattttaccagagaggactatacgtatgattacgaccttttaaatgcaatataaacttaataacttcttacaaagtctattattaataccgtagatatttattcatcttaccctgtgcaccaaaagcaaaaactcactgacgcgggtttgaaactgatggcaaccgcaaaaatgcctgatgcgctacgcttatcaggcctacgccatctctgcaatatattgaatttgcgtgcttttgtaggcaggataaggcgttcacgccgcatccggcatgaataaagcgcactcaacaatctgaaacccgccggaacggtttattacgtacatcaggtaaaactgaccgataagccgctttcttttgggtatagtgtcgtggacagtcattcatctttctgcccctccaaaagtaaaaacccgccgaagcgggtttttacgtaaaacaggtgaaactgaccgataagccgctttcttttgggtatagtgtcgtggacagtcattcatctttctgcccctccaaaagcaaaaacccgccgaagcgggtttttacgtaaaccaggtgaaactgaccgataagccgctttcttttgggtatagcgtcgtggacagtcattcatctttctgcccctccaaaagcaaaaacccgccgaagcgggtttttacgtaaatcaggtgaaactgaccgataagccgggttctgtcgtggacagtcattcatctaggccagcaatcgctcactggctcaagcagcctacccgggttcagtacgggccgtaccttatgaacccctatttggccttgctccgggtggagtttaccgtgccacggactgttaccagccgcgcggtgcgctcttaccgcaccctttcacccttacctgatcccgcttgcgcgggccatcggcggtttgctctctgttgcactggtcgtgggtttcccccccaggcgttacctggcaccctgccctatggagcccggactttcctcccctccgcccgtctcccccgaagaggacgacgacgaagcggcgactgtctggtcagcttcggcgcgcagtatagagggtttgcgcgcccttgtcaccccgcgttgcgcattccaatcgccagtgtcgcggcgatattacgactagcacggcagatattgtcataagccccgcggaatgcttcgtccaacgtacctatgctggtcaatacgctgaagaccgcatcaatgccatgctgatgtacaacgccaacatcatcggtcaggctacccgcaatgccaatcaccggtttatggtacttcttcgccacgtttgcgacaccaatcggtaccttcccgtgaatactctggctgtcaatacgcccttcaccggtgatcaccagcgtacaatcgtgaatatgttcctccagattcagcgccgtagtgacgatttcaataccacttttcagttccgcaccaagaaacgccattagcgccgcgcccataccacccgcagctcctgcaccggggacatctttcacatcaacatgcagcgcttttttaatgacctcggcatagtgagagaggttattgtccagctcaacaatcatcgcttcactggctcccttttgtgggccaaagatgcggcttgcgccgttatcgcccaccagcggattggtgacatcacaagcgacgcgaatgacgcaatcttttaagcgcggatcgaggccggaaatatcaatatcattcagagtattaagactaccgccgccaaaaccaatttcattgccgttggcgtcgcataatttcgcccccagcgcctgtaccatgcctgcgccgccatcatttgtagcgctgccgccaatgccgataataatgtttgtcgcaccgctctccagcgcctgcaggattaactcgcctgtgccgcgactagtggtcacgagtggatcgcgtttttccgcaggtaccagctccagcccactggccgccgccatttcaataaacgcggttttgccatcgccggagatcccccaactggcattcactttctcgcccagcggccctgtaacccaggcgtgacgttcagccccctgggtggctgcaatcatcgcttccaccgttccttcgccaccgtcggcaaccggaacagaaacgtactgtgcatcaggaaaaatttcccgaaatcctttttctatcgcctgcgcaacctcgctggcagataaactttctttataagagtctggggcgattacgattttcatacctatgcctgttaccacatgacgccggagggcgtttctcttattcggcctggattccaggcccggattgcaatacgccatccgggcacgacgtcattaacgagtaacttcgactttcgccagtttttcgtagtagcacgccagggcgctatgatccgccgttcctaaaccatctgctcgcagtgcctgcatcatctccataaccgcagctgtgagcggcagttgtgcgccgacgccgtgagaagtatccagcgcattcgccagatccttaatatgcagatcaatacggaagcccggcttgaagttgcggtccatcaccatcggcgctttggcatccagcacggtactgcccgccagtccaccgcgaattgcctgataaaccaggtccgggttaacgcccgctttagttgccagcgttaacgcttcactcatcgcggcaatattcagcgccacaatgacctgatttgccagtttggtgacgttacctgcaccgatttccccggtatgcaccacggaacccgccatcgctttcatcaaatcatagtatttgtcgaaaatagccttgtcgccgcccaccatcacactcagcgtaccgtcgatggctttcggttcaccgccgctcaccggagcatccagcatatcaatgcctttcgctttcagcgcttcgctgatttcacggcttgccagcggtgcgatagaactcatatcgatcaataccgtacctggcttcgcgccttcaataatgccattctcacccagcgccacctctttcacatgaggggagtttggcagcatggttatgatgacgtcgcactgttcagcgatcgctttagccgtagacgctgtttctgcacctgcagcaatcacgtcagcaatagcttctgggttacggtcagcaaccaccaggctgtaacctgctttcagaaggtttttactcattggtttacccataatccccaggccaataaaaccaactttcatagtcatatcaatcatctctcttgttgcggtggtggttattttttaaaggtatcagccagtttctgagtggcagagcggaagacgccgagatcgctgccgacagccacaaacgtcgcgccccattccagataacgacgcgcatcggcttcgaccggcgcgaggataccgctgggtttgccgtgcgcgctggcacggttaaaaatgtgctgaattgctttttgtacatccgggtgacttgcattgccgagatggcctaatgccgcggccagatcgctggggccgacgaagatgccgtctacgccttcggtagcggcaatggcatcgacgttatctacgccctgctgactttctatctggaccagaatagtgatgttcttgttgctctgagcgaaataatccgccacggtgccaaacatattggcgcggtgagaaacggagacgccgcgaatgccttccggtgggtaacgggtacttgccaccgccagctctgcttcctcttttgtttctacaaaaggaatcaggaagttatagaaaccgatatccagaagacgcttaataattaccggctcgttggtcggcactcgcactactggcgcgctggcgctgcctttcaaggccattaactgcggaataaacgtggagatatcgtttggcgcatgttcgccatccagcaccagccagtcaaacccagccaaaccaagaacttcagtgctaatcgggttagagagtgcactccagcaaccaatttgtacctgtttcgcagccagtgcggctttgaatttattcgggaaaacatcgttattcatcgcttatacctttgcttatttctgcaattccatacgtttaatgtcgccaactacgaagaggtagcagaccatcgccatcagcgcactacatcccacgaaaaccagtgctgcattgaaggagtgcagttcacttaccaggtagccaatcaccagtggagtgacaatggaggcaacattgccaaagacgttaaagacgccgccgcagaggccaacaatctctttcggcgcggtgtcagaaatcaccggccagcccagcgcaccaaatcctttgccaaagaaagccagcgccatcagcatgaccaccagcgtggtgttgttggtgtagttacataagatgatggtggaagccagcaacattcccagcacaatcggtagcttacgtgccagggtcagggataaaccgcgtttgatcagataatcgctgaagacacctcccagcacgccgcccgcaaaaccacacagtgctggaatgctggcgaccagacccactttcagaatgctcatgcctttttcctgcaccagataaatcgggaaccaggtgaggaagaaccaggtgatggtgttgataaaatattgtccgaaaaatacgcccagcatcatgcggttagagagcaattgcttgatgtaatgcagtttgggtccgcttgctgccgcactgcccggctttttgtggtccatatcgaccaccgcgccattttcagagataaacttcagctcttccgcagacatacgtgggtgatctgtcgggttatgaatcaacttgatccacagcgccgtcagcacaaaaccaatcacccccataacggtaaagacgtgctcccagccccaggcgaaagtcagccagccaagcagcgggctaaagagcgccaggctgaaatattgcgcgctgttaaagatggcggaggcagtaccacgttctttcgtcgggaaccaggcggcgacaattcgggcgttcgccgggaaacttggcgcttcgctgaagccgagcataaagcgcataaagaacatggagatccctgcccaggccagcgggaacatatcaacaaagccttgcaggaaggtgaataggctccagaaaaagaggctgtaggtgtaaacttttttgctgccaaacttatcaagcagccagccgccggggatttgcatcagcaagtaggcccagccaaaagcggagaagatgtaacccatgctaaccgcacttaactgcaactcttttgccacttcggtaccagcaatagacagcgttgcacgatcggcgtagttaacggcggtaacaataaaaataatcagtaatattaaatagcgggtatgcacgcctttctttttttcgtcaacggtgtccagaatcattttatttacctcgggtacttatgctgatttttattattatggggaaggtgttatttatgagtttcatttatgccgtaacgacaatgaactcgggaattagtataagcagcgcgagaataataatcattgtgcaaatgctaatttaattaatactatttaaatattattttgagcatatgcacataaggttgcgcgctaaagcacagatttgcgctttaccttaccgggcggcactgcaatccctgaaatgattgacattgatcacatttctgcgtttaaactcctgacattcttatttcacccaatgaagtcatttatttttaaatgagaccaggtcctcattttaataacccctggctggagaatattgcacaatggccaacatcgaaatcagacaagaaacgccaactgcgttttatataaaagttcacgacacagataatgtggcaattattgttaatgataatggcctgaaagcaggaacgcgttttccggatgggctggaattaattgaacatattccccaggggcataaagtcgcattgctggacattccggctaatggtgaaattattcgttatggcgaagtgattggttacgccgtgcgtgcaatcccacgcggaagctggatcgacgaaagtatggttgtactaccggaagcgccgccgttacacacgctgccactggcaaccaaagtcccggaacccttaccgccgctggaaggatacacctttgagggctatcgcaatgccgatggcagcgtgggcaccaaaaacctgctcggtatcaccaccagcgtccactgtgtggcaggcgtggtggactatgtagtaaaaatcattgaacgcgatctgctaccgaaatacccgaacgtcgatggcgtggtggggctgaatcatttgtacggttgtggcgtggcgattaacgcaccggcggcagttgtacctatccgtaccattcacaatattagcctgaatcctaactttggcggcgaagtaatggtgattggcctgggttgtgaaaagttgcagcctgagcgcctgctgactggaacggatgatgtgcaagctattccagtagaaagcgccagcattgtcagtttgcaggatgaaaagcatgtcggttttcagtccatggtcgaggatattttgcagatcgccgaacgccatctacaaaaactgaatcaacggcagcgagaaacctgcccggctagtgaactggtcgttggtatgcagtgcggtggcagcgatgcgttttctggtgtaacggcaaacccggcggttggctatgcgtctgatctactggtgcgctgcggcgcaacggtgatgtttagtgaagtaacggaagtgcgtgacgcgatccatctgctgacaccacgcgcagtgaacgaagaggtcggcaaacggctgctggaggagatggagtggtacgataactatctcaatatgggaaaaaccgaccgcagcgccaaccctagcccgggcaacaagaaaggcggtctggcaaacgtggtagagaaggcactcggctccattgctaaaagcggtaaaagcgcaattgttgaagtgctgagccccggtcaacgcccgactaaacgcggattaatttacgccgcgacgccagccagcgattttgtctgtggcacgcaacaggtggctagcggtatcacagtgcaagtgtttacgaccggtcgtggtacgccgtacggcctgatggcggtacccgtcattaaaatggcaacccgcaccgagctggcgaaccgctggtttgatttaatggatattaatgcgggcaccatcgctaccggcgaagaaactattgaagaggtgggctggaagttgttccactttattctcgacgtcgccagcgggaagaagaaaaccttcagcgatcaatgggggctgcataaccagctggcggtgtttaacccggcaccggtgacctgatttcttttggaacgtccctcgcaaaacatggccttagtgccatgtttttattgtttaaagcccccacgtccattaataatgcatttgcattaccttagttcaagcttataatttgagcagaaaacaggctgtaaaaggacagtgaatcatgcccgctaatgctcgctctcacgctgtactgaccactgaaagtaaggtcacgatacgcggacaaacaactatccccgcgccagtgcgtgaggccttaaaactgaagccaggccaggacagcattcattacgaaattctgcctggtgggcaagtatttatgtgccgactgggagatgaacaggaggatcatactatgaatgcatttttgcgttttctggatgcagatatccagaacaacccgcaaaaaactcgtccattcaacattcaacaaggaaagaaacttgtcgctggcatggacgtcaacattgatgatgagattggcgacgacgaataatggattttccacaaagggttaatggttgggcgctatatgctcatccctgttttcaggaaacctacgacgctttagttgccgaagtcgagacattaaagggaaaagatcctgaaaattatcagagaaaagccgccacaaagttattggcggtagtccataaagtgattgaggagcatatcacggtcaatccaagtagtccggcattccgtcatggcaagagcttaggctctgggaaaaataaagactggagtcgggtaaaatttggtgctggtcgttatcgtctcttctttcgttatagtgaaaaagagaaagtcatcattctgggatggatgaacgatgaaaacactctgcgcacctacggtaaaaaaacagatgcctataccgtattcagcaaaatgttaaaaagaggacatcctcctgccgactgggaaaccctcacccgagaaacagaagaaacccattgatggtgttcacaatgcccgccgaacgcattcgtgttgaccagcgggcatcctttctcactccccgaccagaatcacttcaaccccagcctttcgcagtccttccaggctatccgcaggaatgccttcatcaacaatgatcatgtcgatacgttgagtatcaatgatcttatgtaaactggaacgattgaacttactggaatcggtgaccacgatgatccgttccgcaacttcgcacatccgacggtttaaacgagcttcatcttcattatgtgtgctgacgccgcgctccagatcgatcgcatctacaccaagaaacagcatatcgaagtggtaattttgcaggctttgctcagcctgatcgccgtaaaaagattggctctgacggcgcaaatgcccgccggtcatcagcagctcaacgccttccgcttccagcaacgcattagccacgttcataccgttggtcatcgcaattacgtcagtgtgcttgcgcatcagacgagcaatctcaaaagtggtggtcccggaatcgaggataacccgatgacctggctgaatcaactcaacggcagctttcgcaacgctgcgtttcatcgcggtgttcagtgcgcttttatcttccacacttggctcgacactcggcgtcgtgctatcgcagatcaacgcgccaccataggcacgcacagcgatcccctgcttttccagaaacgccagatcgttgcggatcgtcacagtagatacgccatacaatgcgctcagatcgttaacctgcacactcccttgctgtcgcagacgctgaatgatctgttctcgtcgctcgctggtgccagtcactcgcttctcaccactagcgtcggtattactcatagtaagtcctttcgtaaaactttcgtttcatttcgttttgcctattaacgcctttctattaagcaaatgcaagcccaccttgcccattgacgcaagctactctcgtttcagtgactttcattatgtttcttttgtgaatcagatcagaaaaccattatctttcgttttatttttatctcaccatgacgcagtatcaactgaaacaaaacgaaagattaatatcgcagtaatctgaactggagaggaaagtgaaacatctgacagaaatggtgagacagcacaaagcgggcaaaacaaatggaatttatgccgtttgttccgcacatccgctggtgctggaagctgcaatccgctacgccagtgcaaaccaaacgccgttactgattgaagcaacctccaatcaggtagaccagttcggcggttataccggaatgacgcccgccgattttcgcggctttgtttgtcagctcgccgacagcttgaatttcccgcaggatgcgttgattctgggtggtgaccatctggggccaaaccgctggcaaaacctgccggccgctcaggcaatggccaatgccgatgatttgattaaaagctacgttgcggcaggattcaaaaaaatccaccttgattgcagcatgtcctgtcaggacgatccgattcccttaactgatgacatcgtggctgaacgcgccgcccgtctggcgaaagtggcggaagaaacctgtcttgaacactttggcgaagccgatctggagtatgtcattggtaccgaagtgccggtacctggcggcgcgcatgaaaccttaagcgagctggcggtcaccacgccggatgccgcccgcgccacgctggaagcccatcgtcacgcctttgaaaagcaaggtttgaatgccatctggccacgcatcattgccctggtggttcaacccggcgtcgaattcgatcacaccaacgttattgattatcagcccgccaaagcgagcgccttaagccagatggtcgaaaactacgaaacgctgattttcgaagcgcactctaccgattatcaaacgccgcaaagcctgcgccagctggtgattgaccactttgccattctgaaagttggcccagcgctgaccttcgccctgcgtgaagctctgttctctctggcggcgattgaagaagaactggtgccagcgaaagcctgttctggtctgcgtcaggtgctggaagacgtgatgctcgaccgcccggaatactggcaaagccactaccacggtgacggcaacgcgcgtcgtctggcgcgtggttatagctacagcgatcgcgtgcgctattactggccggacagccagattgatgacgctttcgctcatctggtacgtaatctggcggatagtccaattccgctgccgctgatcagccagtatctgccgctgcagtacgtgaaagttcgctccggcgagctgcagccaacgccacgggaactcattatcaaccatattcaggacatcctggcgcagtaccacacagcctgtgaaggccaataagcaaaacaaagaggaacacgctatgccaaatattgttttaagccggattgatgaacgcttgattcacggtcaggtcggcgttcaatgggtcggatttgcgggggcaaatctggtgctggtagccaacgatgaggttgccgaagatccggtacaacaaaacctgatggaaatggtactggcagaagggatcgccgtacgtttctggacgctgcaaaaagttatcgacaacattcatcgcgccgccgatcgacagaaaatcctgctggtttgtaaaacacccgccgatttcctgacgctggtgaaaggtggcgttccggtgaatcgcattaacgttggcaatatgcactacgccaatggcaaacaacaaatcgccaaaacggtttctgtggatgcgggcgatatcgcagcatttaacgacctgaaaaccgctggggtggaatgcttcgttcagggcgtcccgacagagcctgctgtggacctctttaaattactttgagggattcatcatggaaatcagcctgttgcaggcatttgcgttgggcattatcgcctttatcgctggcctggatatgtttaacggcctaacccatatgcaccgcccggtggtcctcggcccgttggtcgggctggtacttggcgatctgcataccggaattttaaccggcggtacgctggaactggtgtggatggggctggccccgctggcgggcgcacagccgcctaacgtgattatcggtactatcgtcggcacggcgtttgccattactactggcgtgaaacccgatgtcgcagtaggtgtcgccgtacctttcgctgtcgcagtacagatggggattaccttcctgttcagcgtgatgtccggcgtgatgtctcgctgcgacctggcaacaaacccgcgccgcatttgatgctggtgccgacggcctggtgcattgctataacgggatgacaggtttacatcaccgcgaaccgggaatggttggcgcgggattaacggacaagcgcgcctggctggaactgatagccgatggtcatcatgtgcatccggcggcaatgagcctgtgttgttgctgtgcgaaagagagaatcgtactgatcaccgacgcgatgcaggcagctgggatgccggatggtcgctatacgttatgtggtgaagaagtgcagatgcacggtggcgttgtccgtaccgcgtctggtgggctggcgggcagtacgctgtctgttgatgcggcagtgcgcaatatggtcgagttgacgggcgtaacgcctgcggaagccatccatatggcgagcctgcatccggcgcgaatgctgggtgttgatggtgttctgggaagccttaaaccgggcaaacgcgccagcgtcgttgcgctggatagcgggctacatgtgcaacaaatctggattcagggtcaattagctagcttttgatagtttgctcctttattgggccttcacttcccccgtaaggcctttctttttctttcgttttgatctgtgcagcggtgtcggatgcgacgctaacgcgtcttatccgacctacagttggtgaccgcaaggccggataaagcgtttgcgccgcatccagcaatcccttttgcttcctttatcttttctttcaacgatcacaaatttcgttttatttcttttttctccattgaactttcagtttcttttctatagattttaatcaacgaaagacatcaccaagtgaaatgaaacgaaaggcaagtgaaagcgacaacgcccgacgtcaagttcatcagactaaggattgagttatgccagaaaattacacccctgctgccgccgcaaccggtacatggactgaagaagagatccgccatcagcctcgcgcatggatccgtagtctcaccaacatcgacgcgctacgttccgcgctcaataacttccttgaaccgttactgcgcaaagagaatctgcggatcatcctgaccggagccggaacgagcgcatttatcggtgacatcatcgcgccgtggctcgccagccataccggtaaaaacttcagcgccgtaccgaccaccgatctggtcaccaatccgatggactacctgaacccagctcatccgctgctgttgatctccttcggtcgatccggcaacagcccggaaagcgtcgcagccgtggaactggcaaatcaatttgtaccggaatgctatcacctgccgatcacctgcaacgaagcgggcgctctttaccaaaacgcgatcaacagcgataacgcgtttgccctgctgatgcccgcagaaacgcacgatcgcggctttgcgatgaccagcagcattaccaccatgatggccagctgcctcgcggttttcgcacctgagacgatcaacagccaaaccttccgcgacgtggcggatcgttgccaggcgatcctgaccagtctgggcgatttcagcgaaggtgtgtttggttacgcaccgtggaaacggatcgtttatctcggtagcggtggcttacagggcgcagcacgcgagagcgcgctgaaagtgctggaactgacggcgggtaaactggcggccttttatgattctccaaccggattccgtcatggaccaaaaagcctggtcgatgacgaaacgctggtggtggtatttgtctccagccacccttacacccgtcagtatgatcttgatctgctggctgaacttcgccgtgacaaccaggcaatgcgtgtaatcgccatcgccgcggaaagcagcgacatcgtcgctgccggtccacatatcatcctgccaccgagtcgtcactttatcgacgttgagcaggcattttgcttcctgatgtacgcccagacgtttgcactgatgcagagcctgcacatgggcaatacgccggataccccaagtgccagtggcaccgttaaccgcgtggtgcaaggcgtaatcattcatccgtggcaggcataagaggatcgcattatgagcattatctccactaaatatctgttacaggacgcccaggccaatggctacgcggtgcctgcttttaacattcataacgccgagacgatccaagcgatcctcgaagtgtgcagtgaaatgcgaagcccggtgatcctcgccggaacgccggggacctttaaacacatcgcgctggaagagatctacgccctgtgtagcgcctattccacaacctacaacatgccactggcgctgcatctcgaccaccacgaaagcctggatgatattcgccgtaaagtccacgcaggtgtgcgcagtgcgatgatcgacggcagccacttcccgtttgccgagaacgtgaagctggtgaaaagcgttgttgacttctgccacagtcaagattgcagcgtggaagcagaactgggccgcctgggcggtgttgaagatgacatgagcgttgacgccgaaagtgcattcctgaccgatccacaagaagctaaacgctttgtcgaactgactggcgtcgacagcctggcggtagcgattggtacggcgcacggcttatacagcaaaacgccgaagattgatttccagcggctggcggaaattcgtgaagtggtggatgttcctctggtgctgcatggtgccagcgatgttccggatgaatttgtccgtcgcactattgaacttggcgtcacaaaagtgaacgttgccacagaattaaaaatagccttcgctggcgcggttaaagcctggtttgcggaaaatccgcagggtaatgatcctcgttattatatgcgcgtcggaatggatgcgatgaaagaagttgtcagaaataaaattaatgtctgtggtagtgcgaatcgaattagtgcataatcattagttttttatgatttatcccaatgtacttcccgattaatatcggggagtgccttaatggaaaaggagataactaaaccttaataaatacatcactacaatatcgcaacaataatatatttaaaaaaattatattattcaactttatggtgaggattacacaatgaccagtccaaatattctcttaacccgtattgataaccgtctggttcacggtcaggttggcgtgacctggacatccaccatcggtgcaaatctgctggtagtcgtggatgatgttgtcgctaacgatgatattcaacagaaattaatgggtattaccgcggaaacctacggctttggcattcgtttctttactatcgaaaaaaccattaacgtcatcggcaaagctgcaccacatcagaagatcttcctgatttgccgtacgccacaaacggtacgtaaattggtagaaggtggtattgacctgaaagatgtcaacgtcggcaatatgcatttcagcgaagggaaaaagcaaatcagcagtaaagtttatgtcgatgaccaggatctcacggacttacgttttattaaacaacgtggcgtgaatgttttcattcaggacgtccctggcgatcaaaaagaacaaatccctgactaaatctaaaatcgccttaatattggtttgaggtaataaaaatgcatgaaataaccctacttcagggattatccctggcggcgttagtttttgttctggggattgatttttggctggaagccttatttttattccgcccgataatcgtttgtaccctaactggcgctattctcggtgatattcagactggcttaattaccggtggtctgacagagttggctttcgccggattaacccctgcaggtggtgttcagccgcccaacccgattatggcgggtctgatgaccaccgtcattgcatggtctacgggcgttgatgccaaaacagcaattggtcttggcctgccgtttagtttgttaatgcagtacgtcattctgttcttctattccgctttcagtttatttatgaccaaagccgataaatgcgcgaaagaggcggatacggcagcgttttcccggcttaactggacaacgatgctcatcgtcgctagtgcgtatgcggtgattgctttcctctgtacttacctggcacagggggcgatgcaggcgctggtgaaagcgatgcccgcctggctgacccacggctttgaagtggctggcggtattctgcctgccgttggttttggcttgctgctgcgcgtaatgttcaaagcgcaatatatcccttacctgatcgccggtttcctgtttgtttgctacatccaggtcagcaacctgttgccggttgccgtactgggcgcaggctttgcggtgtatgagtttttcaatgcgaaatcccggcagcaagcgcaaccgcagcccgttgccagtaaaaatgaagaagaggactacagcaatgggatctgaaatcagtaaaaaagatatcacccgtctgggctttcgtagcagcctgctgcaagcgagctttaactacgaaaggatgcaggcgggcggttttacctgggcgatgttgccgatcctgaaaaagatttataaggacgacaaaccgggcttaagcgcggcgatgaaagataacctcgaatttattaatacccacccgaatctggtcggattcctgatggggttattaattagcatggaagaaaaaggagaaaaccgcgacaccattaaaggcctcaaagtggcactgtttggcccaatcgccgggattggcgatgcgattttctggtttactttgttgccgattatggcgggaatttgcagtagttttgccagccagggaaacctgctggggccgattctatttttcgccgtttacctgcttatctttttcctgcgcgtcggctggacccacgtcggttatagtgtcggcgtgaaggcgatcgataaagtgcgagagaacagccagatgattgcccgtagcgcaaccatcctcgggatcacggtaatcggcgggctgatcgctagctatgtgcatattaacgtggtgacaagctttgccatcgacaatacccacagcgttgcgctgcagcaggatttcttcgataaagtcttcccgaacattttaccgatggcctacaccctgctgatgtattacttcctgcgggtgaaaaaagcgcatccggtgctgttaatcggcgtgacttttgtgctctctattgtttgttccgcattcggcattttgtaaatggaacgaggcactgcgtctggtggtgcctctttacttaaggaatttcatcctgtgcaaacccttcagcaagttgaaaactatacggcgttaagtgaacgtgccagcgaatatttattggccgtgatccgtagcaaaccgaatgccgtgatttgcctggcgaccggagccacgccattactgacgtatcattatctggtagaaaaaatccaccagcagcaggttgatgtcagccagctcaccttcgtgaagctcgacgaatgggtggatctgccattaacgatgccaggcacctgcgaaactttcctgcaacagcatatcgtgcagccgctggggctacgtgaagaccagctcatcagctttcgctccgaagagataaatgagacagagtgcgaacgggtaacgaacctgattgcgcgcaaaggcggtctggatttatgcgttctcggattggggaaaaacggtcatcttgggctgaacgaaccgggagaaagcctgcaaccggcctgccatatcagtcaacttgatgccagaacacagcaacatgagatgttaaaaaccgcgggtcgccccgtgactcgtgggatcaccttaggcctgaaggatattctcaatgcccgcgaagttttgttactggtgactggcgaaggaaagcaggatgcgacagatcgttttctcacggctaaagtctctaccgctatcccggctagttttttatggctgcacagtaactttatttgtttaattaacacctaaccagatgaaaaatttgctcaaaatgtttaaattaacttatgtaacagtcacgcattatattaaataacatttgactgggttgaacataacgccgatagcaaaaggagttatgttcaacaatttaattttagatatacatataacttgttctattaataaatcacctcgtattctgactcgccccctggcgcagcaaagtcaggcatttatactcttttgaatacatagaaaattgatatcaatataatgaaaatatcaaatatttgcatataaatataatcttaaagttcagtctatttaatgttcaatgaaatatttctgcctgtataatctttaaagatgttgaacatatattcacattaaatatgattatgtacttgttacaaggataaggttatatatgaataaagttacaaaaacagctattgcgggcttacttgcgcttttcgcaggtaatgccgctgcaaccgatggtgaaatagtttttgatggcgagattttaaaatccgcttgtgaaatcaatgactctgataagaaaattgaagttgctcttggtcactataatgccgaacagtttcgtaatattggcgagcgtagcccaaaaattccattcactattcctttagttaactgcccaatgactgggtgggagcacgataacggcaacgttgaagcgtctttccgtctatggctggaaacgcgagataatggcaccgtccctaacttccctaatctggcaaaagtaggctcttttgctggcatagcggcaacaggtgtgggtatccgtattgacgatgcggaaagcggaaacattatgccactgaatgctatgggcaatgataacacggtttatcagatcccggcggaatccaatggtattgtcaatgttgacctcatcgcttactacgtaagtaccgtagttccaagtgaaatcaccccaggggaagcagacgctatcgttaacgtaacgctggattaccgttaatacgttagggcgttatctgacctgtcagataacgcccttttccttcctctttctcgttgtatcaggttgaaaaataactatgagtaaacgaacattcgcggtgatattaaccttgttgtgtagcttctgtattggccaggcgcttgcaggaggaatcgttttacagcgaacgcgagtgatctatgatgccagccgcaaagaggctgcgttacctgtcgcaaacaaaggcgcagaaacgccttatttactgcaaagttgggtagataatatagatggtaaaagccgtgccccatttattataaccccaccgctatttcgtcttgaggctggcgatgacagtagtctgcgaattattaaaacagctgataacctgcctgaaaataaagagagcctgttctacattaatgttcgtgccattccagcaaagaaaaaaagtgatgatgttaatgctaacgagttgacgctggtatttaaaacacggatcaaaatgttttatcgccccgcacacctgaagggacgggtaaacgatgcgtggaaaagtctggaatttaaacgtagtgaccatagtctcaatatatataacccaactgaatattacgtcgtatttgccggactggcagtcgataaaaccgatctcacaagcaaaattgaatatatcgcgcccggagaacataaacagttaccacttcctgcatctggcggaaagaacgtgaaatgggctgcgatcaatgattatggcggcagttccgggacagaaactcgtccactgcaataaaaaatataaaaacacaggtcatcagggaatgccacaacgacaccaccagggacataaacgcacaccgaaacagttggcgctcatcatcaaacgttgtttgccgatggtgctcactggcagcggcatgctttgcactaccgctaacgccgaagagtattatttcgaccccattatgctggaaaccacaaaaagtggtatgcaaacaaccgatctgagccgttttagtaaaaaatatgcacaactaccaggaacttatcaggttgatatctggctgaataaaaagaaggttagtcagaaaaaaattacatttaccgccaatgcagagcaacttctgcagccacagtttacggtagaacaactacgtgagctgggtattaaggtggatgaaatcccggcgctggctgaaaaagatgacgatagcgtgatcaacagccttgaacaaatcattcccggtacagctgctgaatttgatttcaatcatcagcaacttaatttgagcattccccaaattgcactgtaccgtgatgcaagaggttacgtctccccttctcgttgggacgatggtataccaacgctgtttaccaactacagctttacaggttctgataaccgttaccgccagggcaatcgtagccaacgacagtacctgaatatgcaaaatggtgctaattttggcccctggcgattacgcaactattccacatggacacgcaacgatcagacaagtagctggaataccatcagtagttatttacaacgtgatatcaaggcgttgaagtctcagttgcttctgggagaaagcgccaccagcggcagtattttttccagctacacctttactggcgtgcaactcgcttccgacgataatatgttgccaaacagccagcgcggatttgccccaacggtacgcggtatcgcaaacagtagtgcaatcgtgactatcaggcaaaatggttatgtgatctatcaaagcaacgtgagtgcgggtgcctttgaaattaacgatctctacccctcttccaacagcggcgatttagaagtcacgattgaagaaagtgacggtacacaacgtcgctttatccagccttattctagtttacccatgatgcagcgacctgggcatctaaagtatagcgcgaccgctggacgctatcgcgctgatgcaaacagtgatagcaaggaacccgaatttgctgaagccacggcaatatatggtttgaataatacttttacgctgtatggcggcctgctcggttctgaagattattatgcgctggggatcggtatcggcggcacacttggcgcactgggcgcgttgagcatggatatcaacagagctgacacccaattcgataaccagcactcttttcatggctatcaatggcgtacgcagtacatcaaagatatcccggaaaccaacaccaatatcgctgtcagctactatcgctataccaacgatggctattttagttttaatgaagccaatacccgcaattgggactataacagtcgccaaaaaagtgaaattcaattcaacatcagccagacaatatttgatggggtaagtctgtatgcctccggtagccagcaagactattggggcaataacgataaaaacaggaatatctctgttggggtttccggccagcaatggggagttggttacagcctgaattatcaatacagccgctacactgatcaaaataatgaccgcgcactctctttgaatctcagtattccgttagaacgctggttaccgcgtagccgggtttcctatcagatgaccagccagaaagatcgcccaacccaacatgaaatgcgtcttgatggcagtctgctggatgatggtcgcctgagctatagcctggaacaaagtctggatgacgataacaaccataacagtagcctgaacgccagttaccgtagtccttatggcaccttcagtgccggatacagctacggtaatgacagcagccaatacaattacggcgttaccggcggcgtggttatccatcctcatggcgtgacgctcagccaatatctgggcaacgcttttgcgcttatcgatgctaacggagcatctggcgtgaggatacaaaactatccggggattgctaccgatccttttggctatgcagtggttccttatctcacaacttatcaggaaaaccgtctcagcgtagatactacgcagctgcccgataacgtcgatcttgaacaaacaacacagtttgtggtgcccaacagaggtgcaatggtagcggcgcgtttcaacgccaatatcggttatcgcgtacttgttacagtcagcgatcgcaacggtaaaccgttgccctttggcgctcttgccagcaacgatgatacggggcaacaaagtatcgtcgatgagggcggcatactatatctctctgggataagcagtaaaagtcaaagctggactgtacgctggggaaatcaggcagatcaacaatgtcagtttgctttcagtacaccggatagtgaacctacaacctctgtattacaaggcacagcgcagtgccattaaggataaaaaaatgaaaagagcgcctcttataacaggtcttttgttgatatccacatcctgcgcttatgcctccagtggagggtgtggagccgacagcactagcggtgcgacaaattacagcagtgtggttgatgatgttacggtgaaccagacagataacgtgacaggacgggagtttacctctgcaacgctaagtagcactaactggcaatacgcctgttcctgctctgcgggtaaggcagttaaacttgtctatatggtcagccccgtacttaccaccactggacatcagacaggatattacaaactcaatgacagcctggatattaaaaccacattacaggcaaacgacattccaggactcacaaccgaccaggttgtctctgttaacacccgattcacacagataaaaaacaacacggtatattctgctgcaacccaaacgggtgtttgccagggtgatacgtctcgttatggacccgttaatattggtgcgaacaccacctttaccctgtatgtcaccaagccatttctcggcagcatgaccattccgaaaacggatattgccgtcattaaaggcgcgtgggtcgatggaatgggaagcccgtctacaggtgacttccatgatttagtcaagttaagcattcagggaaatctcaccgccccacagagctgcaaaattaatcagggcgatgttattaaggttaattttggattcatcaatggtcagaagtttaccacccgcaatgccatgccagacggttttactccagtagactttgatatcacttatgactgtggtgatactagtaagattaaaaacagcttgcaaatgcgcatcgacggtacaactggggtagtagaccagtacaacctggtcgccaggcgaagaagtagtgacaatgtgcccgatgtcggtattcgtattgaaaatctcggcggcggagttgcaaatattccttttcagaacggtatccttcccgttgatccttccgggcatggcaccgtcaatatgcgcgcctggccagttaatctggtcggtggtgagctggaaacaggaaaatttcagggcacagccaccattaccgtcatcgtgcggtaaaagaagacgttgcgttttgattaacgcaacgcttcggcactgttacccctgctgctccagcgcatacttatacagcgcatttttcttcacgccgtgaatttctgcggccagcgccgccgcttttttcagcggcagttctgcctgtagcagcgccagcgtgcgcagggcatcggcgggtaagtcttcttcctgtgctttatgaccttcgacaatcagcaccatttcgcctttgcgacggttttcatcttcctttacccacgccagcagctcgccaacgggcgcgccgtgaatggtttcccaggttttggtcagctcacgcgccagaaccacgtagcgggattcgcctaataccgcaacgatatcttccaggctatctaacagacggtgggtagattcataaaaaatcagcgtgcgcggctccgcttcaatggcttttagcgcatcacggcggcctttacttttggcaggtaaaaagccttcgtaacagaaacggtcagagggtaaacccgctgcgcttaacgcagtgatagcagcacacggcccgggtagcggcaccacgcggatccccgcttcacggcaggtacgcaccagatggtagccaggatcgttaattagcggcgttccggcatcggaaaccagcgcaatgttttgcccctcttgcagcttcgccagcagcgtttcagctttttgttgttcgttatggtcgtgcagcgcaaacaaccgggcattaatcccaaaatgttgcagcaataaaccggtgtgacgagtatcctcggcggcaatcagatcaacggcctgtaatacctctaacgcacgctgggtgatatccgccagattgccgattggcgtcggtacaatgtaaagctggccctgagaattatccgcgctttggtgttgtttcattgtgtcgtccgtattgccgatttaatattgagcattgcgtaaaaaaaatatcactggatacattatggtacccagtacattttctcgtttgaaagccgcgcgttgtctgcctgttgttctggcagccctgattttcgccggttgtggcacccatactcccgatcagtccactgcttatatgcagggcacggcgcaggctgattctgccttttatcttcagcagatgcagcaaagctctgatgataccaggatcaactggcaattactcgccattcgtgcactggtgaaagaaggtaaaaccgggcaggcggttgagttgtttaaccaactaccgcaagaactgaacgatgctcagcgtcgcgagaaaacactgctggcggtagagattaaactggcgcagaaagattttgctggcgcgcaaaacttgctggcgaaaatcacacctgccgatttagaacaaaaccagcaagcgcgttactggcaggcaaaaatcgatgccagccaggggcgtccttccattgatttactgcgcgcgttaattgctcaggaaccgctgcttggcgcgaaagaaaaacagcagaatattgatgccacctggcaggcgctctcctccatgactcaggaacaggcgaatacgctggtgatcaacgccgacgaaaatattctgcaaggctggctggatctgcagcgcgtctggtttgataaccgtaacgatcccgacatgatgaaagccgggatcgccgactggcagaaacgttatccgaacaatccgggcgcgaaaatgctgccaacgcagttggttaacgtaaaagcgtttaaaccagccagcaccaacaaaatcgccctgctgttgccactgaatggccaggcagcggtatttggtcgcactattcagcaaggctttgaagcggcgaaaaatatcggcactcagccagtggcagctcaggtagctgccgcacctgccgcagacgtagctgaacaacctcagccgcaaaccgtggatggcgttgccagcccggcacaagccagcgttagcgatctgaccggtgaacagcctgcagcccagccggtgcctgtaagcgccccggcgacaagcaccgcagcggtaagcgcacccgcaaatccatccgcagagctgaaaatctacgataccagtagtcaaccacttagccagatcttaagccaggttcagcaggatggcgcgagtattgtggtcggtccgttgctgaaaaataacgttgaagagttgctgaagagcaacactccgctgaacgtactggcactgaaccagccggagaatatcgaaaatcgcgtcaatatttgttacttcgcgcttagtccggaagacgaagcgcgcgatgcagcgcgtcatattcgtgaccagggtaaacaagcgccgctggtgctgatcccacgcagtagtttgggcgatcgcgtagccaatgcgtttgcgcaagagtggcagaaactgggcggcggcaccgttctgcaacaaaaatttggttccaccagcgaattacgcgcgggtgttaacggcggttctggtattgctttaacgggtagcccgattactctcagagcgacaaccgactccggcatgacgaccaacaatccaacgctgcaaaccacgccaaccgatgaccagttcaccaataatggcggtcgtgtcgatgcggtgtacattgtggcaacgccgggtgaaatcgcttttatcaaaccgatgatcgccatgcgtaacggtagccagagcggtgcaacgctgtacgccagctcccgcagtgcgcaagggaccgctggcccggatttccgactggagatggaaggcttgcagtacagcgaaatcccgatgctggcaggcggtaatctaccgttaatgcagcaggcactcagcgcggtgaataacgattatagtctggctcgcatgtatgcgatgggcgtcgatgcctggagcctggcaaatcatttcagtcaaatgcgccaggttcagggttttgaaatcaacggtaataccggaagcctgacggctaacccggattgcgtgattaacaggaacttaagttggctacagtaccaacaaggtcaggtagtccccgtcagttaaattaagtgattaacaggaacttatcatggctacagtaccaacaaggagtggtagtccccgtcagttaaccaccaaacagaccggcgatgcgtgggaagcacaagcgcgtcgctggctggaaggcaaaggactgcggtttatcgccgctaacgtgaacgagcgtggcggcgagatcgatctgataatgcgtgaaggccggaccaccatttttgtcgaggtacgctatcgccgctctgcgctttatggcggcgcggcagccagtgtgacccgcagcaaacaacacaaattattacagactgcccgcttgtggctcgcgcgtcataatgggagttttgatactgtggattgccggttcgatgtggtagccttcaccgggaatgaggttgagtggattaaggatgcctttaatgaccacagttaattaaggtttaaggattagcgtgcaagaaagaattaaagcttgcttcactgaaagcattcaaactcaaattgcggcggcagaggcgcttccggatgccatctcccgtgcagccatgacgctggttcagtctctgctcaatggcaacaaaatcctctgttgtggtaatggaacttccgctgccaatgcacagcattttgctgccagcatgatcaaccgtttcgaaacggagcggcccagcttacctgccattgcactaaatactgataatgttgtcttaacggcgattgccaacgatcgcttacatgatgaagtgtatgcaaaacaggtgcgggcgctgggtcatgcgggagatgtattgttagccatttccacccgtggcaacagccgcgatattgttaaagcagttgaagccgccgttacgcgtgatatgaccattgtggcattgaccggctatgacggcggcgaacttgcaggtttgttagggccacaggatgtggagatccgcattcctagccatcgtagtgctcgcattcaggaaatgcatatgctgacggtaaattgcctgtgcgatctgatcgataacacgcttttccctcaccaggatgattaaggagaatacatgaaggcattaagcccaatcgcagtccttatttccgcgctgctgttgcaaggttgtgttgccgctgccgtagtgggtaccgctgctgtgggtaccaaagccgcaactgacccacgcagtgtcggcacccaggtggacgatggtaccctggaagtgcgcgtgaacagcgcattgagcaaagacgaacagattaagaaagaagcgcgcattaatgtaacggcctatcagggcaaagtgctgctggttgggcagagtccaaatgctgaacttagcgctcgcgccaaacagattgctatgggcgtagacggtgccaacgaagtgtataacgagattcgtcagggccagccgattggtctgggcgaagcatctaacgatacgtggatcaccaccaaagtgcgtagccagctcttaaccagcgacctggtgaaaagctccaacgtgaaagtgaccaccgaaaacggtgaagtgttcctgatggggctggtgactgaacgtgaagcgaaagcggcggcagatattgccagccgggtgagcggcgtgaagcgggtaactacggcgtttacgtttattaaataacagccccttgtaatgcctgatgcgacgcttgccgcgtcttatcaggcctacaacgatacaaaccgtaggtcagataaggcgtttacgccgcatccgacatgttttccctcaaatcagaacaacagcgccagcccgccgacaatcacaccagacactgccaccatcgcccctgtcagccataaggctttcgccgggaacgctttgcgcagcataatcagactcggcaaactcactgccgggagcgtcatcaacaatgccagcgccggagcggttcccatacctgccagcatcatcgtttgtacaatcggaatttctgctgccgtgggaatgacaaacaagcatcctgctaccgccatcgccaccacccacatcaggctgttatcgacagcaccatcggcatgggggaataaccagacgcgagcggcacccaacaccagtactgcaaggatgtaaaccgggatcgtactccagaaaagcgtccatagcgccctgccccagcggctaaaaaacccgccctgtgcttccggtatgtcaatttcgaccggtgcctgcgtttgcggtgtttcacgcacccatttttgcaccagcgtcgcaatcagcaacaccatcaccagcccggccaccagacgaatcgccgcaaaaccccagccgaggacaaagcccataaacaccagcgtcgccgggtttaacaccggattgcccatccagaatgccagcgcaccgcccatgctcacctgttggcgacgcattcccgccgcgaccggagccgcacagcaggtacacatcatgcccggcaagctaaacagcgttcccagcagcgtgccgcgaaagcggctttgcccaagcgtacgcaacaaccagtcacgcgggatcagcacctgaatcaagctaccgaggatcacccccagcaccgccgctttccataccgcgaggaaatagatcatcgcgtaatccaacgccgcctgccatgggttagcatccgcctgcgcaaggatagatttaccgatactgtgggtttcggcagcagtaaacgctttgccgtagtaaggttcccatttcacataccagagaccggcaatgacaacgagaaagaaaagcgcgggtttccaccactgaatgggcgttgccgcctgagaactagactgaccagtcatagcattccccaggaataagttatgataattgagcgcgtgaatattacgctcactatcaattcttgggaataattattcagctcttttgcgtaattcactagagcttaaaatcgtcacgccttcatgctcaggccgcatgctctctgccagcatgacccgcgccacgtctctcgcatcaatggatttccagttacctggtaacaaacggaacagcggcgcaaaaagcgtttcgttcatccgctgtttgctacgatcgcccagtaacatgctcgggcgagcaatggtcaatttcggccagttctgggcgattaatgcttcttccatctcccctttgacgcggttatagaaaaacgggctgtgggcattggcacccatcgcactgactaccaacatatgctgcgcgcccagtcgccgcccggttaatgcggtatccactaccagcgtgtaatcggcatgaataaacgcctctttgctccccgcttctcgccgcgtggtgccgagacaacaaaacacaatgtcgatgggatcggtgacctgcgccaacgcgtcactcagttgcggatcatggggattaaacaccccgggcatatcgcccaacggacgtcgcgtcggcgcagcaatggcgttaactttcggttcgttaatcaacatccgcagcaggtgaccgcccaccagccccgttgcgcctgtaatcagtacctgactcatcttcgctcctttacagaattgtctgccttgcgctccacggctcatgcaccaggcttaatagaccatgaggtaattatccccgattgtgggaaattcgcctcatccaatgcaacaacgcggaggaagcatgagtaagaaaattgccgttttaatcactgatgaatttgaggatagtgaatttactagtcccgcagacgagttccgtaaagccggacacgaagtgattaccattgaaaaacaagcgggtaaaacggtgaaaggcaaaaaaggagaagccagcgtgaccatcgataaatccatcgatgaagtgacgcctgcggagtttgatgccctgctgctaccgggcggccatagtccggattatctgcgtggggacaaccgttttgtcacctttacccgtgattttgtgaatagtggcaaaccggtgtttgccatctgtcacggcccgcagttgctgatcagcgccgatgtgattcgggggcgcaaactgaccgcagttaaaccgatcattattgatgttaaaaatgcgggcgcggaattttacgatcaggaagtcgtggttgataaagatcagctggttaccagccggacaccggacgatctgccagcgtttaaccgcgaggcgttacgcctgctcggtgcctgattacgcctgctcggtgccactgtcgcgtagccaaatcatttttttaccaaagcccagcgtgttgtcggtgaatttgatttcatcgagccggatttcccacaccggggcgctcagcattctggcaaccggaaagcgacgattgtacgccttgcgcgcgaggtcgctttcctcaccttccagcctgcggatctcacctttaaactgcacaccgcgaattaacgctaccgttttcggctgaccgtttaccgttccggcaaccgcagcctgcggcccactcatctgcgcgtggcgcgttttttcttccgtcaaaatgtagaaggcgactttctgcgcatcaaaaagataaaaggcattagcgcaccagagttccccttcctgctgcacacaccaagtgacaacatgttgttttgccagccaacggctgatggcgatgagtgtttccattgctgttctcttttatactgtgggcctgaccttaacatgcgacgcagacgatgacaccctggtttctttacttgatccgtaccgccgacaataagctttataccgggatcaccacggatgtcgaacgccgctatcagcagcaccaaagcggcaaaggggcgaaagcactgcgcgggaaaggagaactaacgctggtgttttccgcgccagtgggcgatcgtagcctggcgttacgggcggaatatcgcgttaagcaactgaccaaacggcaaaaagagcgtctggtagcggaaggcgcagggtttgcagagctgttaagcagtctgcaaaccccggagattaaaagcgattgaaatgctcgtgatactcaaccaggccggtaacgccattcagcgcgtcatccgctaaacgatgtacctggaaggcgctttcagtgcccggccagcggcaacgcagatcgtgatgcgccgccagttcaaagccgaaacgactgtacagcgccggatcgcccagcgtcaccactgcggcatagccgaactcattaaggctatcgagtccttcatagaccagttggcgtgccagcccctgtccacggtatttttcatcaaccgccaacggtgccatgccgacccattgcaggtcttcgccctgcacatcaaccggactaaatgccacatagccaatgacctgaccttcgtcatctgtcgccaccagccccagcgtcagaaagccatcttcacgcagatcgtgaaccagcttcgcttccgcatcactttcgaaactgcgacgcagcagggcatcaatacccggcgcatcaatgggaatttctactcgaattagcatggttcacctacgcttgtctgtttggtttcaggcgcggttttcattcccgcctcaacaaaatccgccagttgcagcagcatcatgcgtaaggctttcggcatttgctccagttcaatggcgtccatcaggtttttcacatacagccccagctccgtatcgccttcaatcaccagccgacgctggaagaagagcgtatccggatcttgtttacgcgccgcaatcatcagcagatcgctggcgtcggcactaaaactcacatcagcttgcgcgttctggctaacgaccagtttgccattcaccacgctggtaaaccattgcaggtcaatatcacgcacatgaatacttaaccagcggccttcaagaaactccagctcgccatcatccagcgcctggcggaattgccagcttaagacctgctcaagaacctggcgttttagcgcaaatggcgtcagttttaccggtacactcaacagagatggccccaaatgcacaatacgggaacgcagtttatccaacacgagttttactccctgtttcaacaatcatcctattttgccatatcagaaaaataacatagcggtataaatcaacaattccatatgaaattgctgctaccaccaatacaactttaactgccttaaatcaaaaattgtcgcagcaaggttaactaaaatcccagttcgttaacatttttgcgttttgatagcgcaaccttcaggaaaaattatggagctgctctgccctgccggaaatctcccggcgcttaaggcggccatcgaaaacggcgcagatgctgtttatatcgggctaaaagatgataccaatgcccgtcacttcgccggccttaactttaccgagaaaaaattgcaggaagcggtgagttttgtccatcaacatcgccgcaaacttcacatcgcgattaacacttttgcgcatccggacggttacgcccgttggcagcgcgccgtggatatggcggcgcagctgggtgccgacgcgctgatcctcgccgacctcgccatgctggagtacgccgccgagcgttatccgcatattgagcgccacgtaagcgtgcaggctagcgcgaccaatgaagaggcgattaacttttatcatcgccattttgacgttgctcgcgtggtgctgccgcgcgtgttgagcattcatcaggtgaaacaactggcacgggtcacacctgtaccactggaagtctttgctttcggcagcctgtgcattatgagcgaaggtcgttgctatctgagcagctatctgacgggtgagagccccaacaccataggcgcgtgttctccggcccgtttcgtgcgctggcaacaaacgccgcaggggctggaatcccgcctgaacgaagtgctgatcgaccgttatcaggacggcgaaaacgcaggttatccgacgctatgtaaagggcgttatctggtggacggcgagcgctatcacgcgctggaagaaccaaccagtctcaataccctggaactgctgccggagttaatggcggcgaatattgctagcgtgaaaattgaaggccgccagcgtagcccggcgtatgtcagccaggtggcgaaagtctggcgtcaggctatcgaccgttgtaaggccgatccgcaaaactttgtaccgcaaagcgcgtggatggagacgctcgggagcatgtccgaaggcacgcaaaccactcttggcgcatatcaccgtaaatggcagtgagaaaagcaatgaaatattccttagggccagtgctgtggtactggccaaaagagacgctggaagaattttatcagcaggccgccaccagcagcgccgacgtgatttatcttggtgaagcggtatgcagcaagcgtcgggcaaccaaagttggcgactggctggagatggcaaaaagcctcgccgggagtggtaagcagattgtgctctccacgctggcgctggtgcaggcaagttctgaactgggcgaactgaaacgctatgttgagaacggtgagtttctgattgaagccagcgatctcggcgtggtgaatatgtgcgctgaacgcaaactgccgttcgtcgccgggcacgcgctgaactgctacaacgcggtgacactgaaaatattgctcaaacagggcatgatgcgctggtgtatgccagtggagctttcccgcgactggctggtgaatctgcttaatcagtgcgatgagctgggcattcgtaaccagtttgaagtggaagtcctgagctacggtcatctgccgctggcctactccgcccgctgctttaccgcgcgtagcgaagaccgcccgaaagatgagtgtgaaacctgctgcattaagtatccgaacgggcgcaacgtgctgagccaggaaaaccaacaagtgtttgtactcaatggcattcagaccatgagcggctacgtttacaacctcggtaacgagctggcatccatgcagggcctggttgatgtggtccgcctgagtccgcagggtactgacactttcgcgatgctcgacgccttccgcgctaatgaaaatggcgctgcaccactgccgttgacggcgaacagcgactgtaacggctactggcggcggctggcaggactggagctgcaagcctaagtaaatagctcactttgttaacaactttaactactctttaatgcagtattaaagattaatcggtaacaaagtgagctgttatgactgataaaaccattgcgtttagcctactcgatctggcccccattcccgaaggttctagtgcgcgagaagcattctcccactctctcgatctcgcccgtctggctgaaaagcgcggctatcatcgctactggctggcagaacaccacaatatgactggcattgccagtgctgccacgagcgtattgatcggctatctggcggcgaataccaccacgctgcatctggggtctggcggcgtgatgttgcctaaccacagtccgttggtcattgcagaacagttcggcacgcttaatacactctatccggggcgaatcgatttggggctgggtcgtgctccgggtagtgaccaacggacaatgatggcgctacgtcgtcatatgagcggcgatattgataatttcccccgcgatgtggcggagctggtggactggtttgacgcccgcgatcccaatccgcatgtgcgcccggtaccaggctatggcgagaaaatccccgtgtggttgttaggctccagcctttacagcgcgcaactggcggcgcagcttggtctgccgtttgcgtttgccagtcacttcgcgccggatatgctgttccaggcgctgcatctttatcgcagcaacttcaaaccgagtgcacggctggaaaaaccatacgcgatggtgtgcatcaatattatcgccgccgacagcaaccgcgacgctgaatttctgtttaccagtatgcagcaagcctttgtgaagctgcgccgtggcgaaaccgggcaactgccgccgccgattcaaaatatggatcagttctggagtccgtctgagcagtatggcgtgcagcaggcgctgagtatgagcttggtaggtgataaagcgaaagtgcgtcatggcttgcagagcatcctgcgcgaaaccgacgccgatgagattatggtcaacgggcagattttcgaccaccaggcgcggctgcatagctttgagctggcgatggatgttaaggaagagttgttgggataatgtgtcttaacgcgggaagccttatccgagctggcaacgctgtcctacatagacctgataagcgaagcgcatcaggcattgtgtaggcagcagaaatgtcggataaggcaccgctgattactgatacaccggcagtaaattaaagctgcttaaaatatgcaccagtgcgttgccgacgccaaacaccagaatcagcgcaatcatcggcttgccaccccagacgcggaatttcgggctgccaaagcgtttacggcttgcacgggctaacagcgccggaacaattgccgcccagatggtagccgctaaaccagcataaccaatggcgtacaggaatccgttcgggaacaacagcccccccacaactggcggggcaaaggtcagcaatgccgttttcaagcggcccacagcgctgtcgtcgaaaccaaacagatctgccagatagtcaaacaaacccagcgttacgccgaggaagctactcgctaccgcaaagttactgaacacgaccagcagcagatccagactacggctgttcagtacgccgcttaacgcctgtaccagcacatcaatattaccgcccttctctgcaataccgataaactccggacgcgggatgttacccatcgtcgccagcaaccagatggtatacagcgccagcgccatcagcgtaccgtacaccagacatttcacgatggttttcggatctttgccgtaatacttcatcaggcttggcacgttaccgtgataaccaaagcttgccagacagaacggcagggtcatcaacagatacggtgcataagacgcattgctttcggcgacgttgaacaatgtcgcaggctgcacatgccccagcaggctaccaaaggtgaggaagaaggtaatgactttcgcccccagcacaatcgctgtcatgcgactgacggctttagtgctcaaccacaccacaaacgctaccagcaatgcaaaaccaaaacccgccgcccgtgccgggacgtttagactcatctctgcgaaggtgtgatgcagaatgctaccactggcagaaatataggcataggtcaggatatagagcacaaaggcaatggaaatgccgttgaccacgttccagcctttgcccagcaaatctttggtgatggtgtcaaaactgctaccgattctgtaattcaggttagcttccagaatcatcaagccggaatgcagcatacagaaccaggtaaagatcagcgccgccatactccagaaaaaccacgccccggacatgaccactggcagagaaaacatccctgcgccaataatggtgccgccgataatcaccacgccgccaagcaggctcggactcgtttgggtggtggttagtgttgccatgagggcttctctccagtgaaaaatagtgcgactgcgttgttatgcattgcactgtaccagtacacgagtacaaaagacagaaaaaaagccccgatggtaaaaatcggggctgtatatattattttacagattgtgttcgctgttcagcgatgattacgcatcaccaccgaaacgacgacgaccggtagaatcatcacgacgcggagcgcggccttcacgacgttcgccgctaaaacgacgaccatcaccacggccaccttcacggcgttcaccgctgaagttacgaccgccttcacgacgttcgccaccgaaaccacgaccaccgccacgacgctcaccgccagtatgcggctgtgcatcgcccagtaactgcatgttcatcggcttgttgagaatgcgagtgcgcgtaaagtgttgcagcacttcacccggcatacctttcggcagttcgatggtggagtgagaagcaaacagcttgatgttaccaatgtaacggctgctgatgtcgccttcgttagcaatcgcaccaacgatatgacgaacttcaacaccatcatcgcggcccacttcaatgcggtacagctgcatatcgccaacatcacgacgttcacgacgcggacgatcttcacggtcaccacgcgggccacggtcgttacgatcgcgcggaccacggtcatcacggtcacggaattcacgtttcggacgcatcggcgcatctggcggtacgatcagagtacgttcaccctgtgccattttcagcagtgccgcagccagagtttcgagatccagctcttcaccttcagcagtcggctgaattttgctcagcagtgcgcggtattgatccagatcgctgctttccagctgctgctgtactttagcggcgaatttttccagacggcgtttgcctagcagttctgcgttcggcagttctacttccggaatagtcagcttcatagtacgttcaatgttgcgcagcagacgacgctcgcggttctcaacgaacagcagcgcgcggccagcacgacccgcacgaccggtacgaccgatacggtgaacgtaagactcagaatccatcgggatatcgtagttaactaccaggctgatacgctcaacgtccaggccacgggctgcaacgtcggtcgcaatcaggatgtccagacgaccatctttcaggcgttccagtgtctgttcacgcagcgcctggttcatgtcaccgttcagcgcggcgctgttgtagccgttacgctcaagagcttcagccacttccagagtcgcgtttttggtacgaacgaagataatcgccgcatcaaaatcttccgcttccaggaaacgtaccagtgcttcgtttttgcgcataccccagacagtccagtagctctggctgatgtcaggacgggtagtcacgctggactgaatgcgcacttcctgcggctctttcataaagcggcgggtaatgcgacgaatcgcttccggcatggttgcagagaacagagcggtctgatgaccttccgggatctgcgccataatggtttcaacgtcttcgatgaagcccatgcgcagcatttcgtcagcttcatccagaaccagaccgctcagtttagagaggtccagagtgccacgtttcaggtggtccagcagacggcccggagtaccgacaacgatctgcggcccctgacgcagggcgcgtaattgcacgtcataacgctggccgccgtacagagcaaccacatttacgccgcgcatgtgtttagagaaatccgtcattgcttcagcaacctgtaccgccagttcgcgggtcggtgccagcaccagaatctgtggtgctttcagctcaggatcaagattctgcaacagaggtaaagagaatgctgcagtttttccgctccccgtctgggccatacccagaacgtcgcggccattcagcagatgtggaatacactctgcctgaattggagatggtttttcgtaacccagatcgttaagggcttcaaggataggagccttcaggcccagatctgcaaaagtggtttcgaattcagccatgtagtacgtgtgcctcaaaattaatggcggccagtctacataactcatcatgaaattgatcagcaattttcattgaaaagtgtgaaccggctcaaagtaggtgtattaacgaacaacaacgccctcacccgttaaggtgatggcaatcaaaaaagattacgggctgatgtgtacgtcagttattgctggtcgctttctgccaggtcatcttggtcctggcccaggaggcttaattccaacaatgcgtatcggtgctcaacaaagttatgaacgttgttggcaaccgccagtttgaacagtgccgtggcgctgtccaaatcccccagacttaggtagtacttacctaaatagaagttggtttcactgagatgctcagcgaggctggtgttatccgttgcgtccgccttgagcctttccattaacgtttgttcgctaatgttgcccaggtagaactcgacaatgttccatccccactgttccttatcgcttttttcgaagtgctgtttcaacacttctttagcctgcttctcatcgagcttctgctcggcgagataaagccacagactacggaaaggatcattgggatcgtcttgataaaacgccagcagatcatcttgcgctaacttgtcacgaccgccgtaatataatgcgatcccgcgattcaagtgcgcgtagttgtaagttggatcaagctcaagtacagaatcaaacgcttcataggcagcatcaaaattgcctgcctgcgttaaatatatgcctaagtaattgaatacttcaggcatatccggtcggattgccagcgcttggctaaaatcgttacgcgctaatgccctcagaccgagactatcatacaacactccgcgctcatataaaagctgtgcgcgttcgtcatcggttaaagcccgactggcaaggatttgttccatacgtgccagaatcacttcctgctgtaaagtcggttgcaatggtaccgcgaggacttcacttttacgccaggaagtattactgcatcctgcaagcgtaagtgctgtcgcaacgaaacaccagcgcaaaaaaggcttcatttcccactcccgaagaccacggttgaatgaacgtcctgttcccggttgctaacaaggcgtcctgcccggttaaaagccccccgccgcagcggagggcaaatggcaaccttactcgccctgttcagcagccggagcttccggtgctgcagcaggttgagactgctcagtcgcttctttaatgctcagacggatacggccctggcgatcaacttccagaactttcaccggtacttcctgacccatctgcaggtaatcggtcactttctcaacgcgtttgtcagcgatttgagagatgtggaccagaccttctttaccgccgccgatggcaacaaatgcgccaaagtcaacgatacgggtcactttaccagtgtagacgcggcccacttcgatttctgcagtgatctcttcgatacgacgaatagcatgtttcgctttctcgccgtcggtcgctgcaatcttcacagtaccgtcatcttcgatttcgatggtggtgccagtttcttcggtcagagcacggattacagaaccgcctttaccgataacatctttgatcttgtccgggttgatcttgatggtatggatacgcggtgcgaactcagagatatcgccacgcggcgcgttgatcgcctgttccattacgcccaggatatgcagacgcgcacctttagcctggttcagcgcaacctgcatgatctctttggtgataccttcaattttgatatccatctgcagtgcagagataccgtcgcgggaacctgcaactttgaagtccatatcgcccaggtgatcttcgtcgcccaaaatgtcagacagtacaacgtagttgtcgccttctttcaccagacccattgcgatacccgcaacggcagctttgatcggcacacctgcgtccatcagcgccagagacgcgccgcacacggaagccatagaagaggaaccgttggattcagtgatttcagacacaacacgtacggtgtacgggaatttgtccatatccggcatgactgccagcacgccgcgcttcgccagacgaccgtgaccaatttcacgacgcttcggagaaccgaccatgccggtttcgcctacggagtacggagggaagttgtagtggaacaggaaggtatcggtacgttcgcccatcagttcatcaagaacctgcgcgtcacgagcagtacccagcgttgcggtaaccagcgcctgcgtttcaccacgggtgaacagcgcagaaccgtgagtacgcggcagcacgccagtacgcacatccagaccacggatcatatctttttcacgaccgtcgatacgcggttcgcctgccagtacgcggctacgaacaacgtttttctcgatcgcgtgcagaatttcacccagttcgttttcgtccagggtttcgtcttcagcaagcagcgtcgcgatggtttcagatttgatgacatcaacctgcgcataacgctcttgtttgtcggtgatgcggtaagcatcgctcaggcgagcttcagccagtgcagcaacgcgcgcgtttagcgcttcgtttaccggctccggctgccagtcccaacgcggtttaccggcttctttcaccagttcattgatgttctgaataacaacctgctgttgttcatgaccgaacactactgcgcccagcatctggtcttcgctcagcagttgagcttcagattcaaccatcagtacagcggcttcagtaccggcaacaaccagatccagtttgctctctttcagctcgtcctgagtcgggttcagtacgtactggtcattgatgtaacctacgcgggcagcaccaatcgggccattgaacggaataccagacagagacagcgctgcggaagcaccaatcatcgcgacgatatccgggttaacttgcgggttaacagaaaccacggtggcgataacctgaacttcgttgacgaagccttccgggaacagcgggcgaatcgggcggtcaatcagacgcgcgatcagggtttcgccttcgcttgggcggccttcacgacggaagaagctacccgggatacgaccagcagcgtaggtacgctcctgatagttaacggtcagtgggaagaagtcctgacctggtttggcttttttctggccaacaacggtaacgaataccgcggtgtcatccatgctaaccataacagcggcagtagcctgacgagccatcatgccggtttccagagtcacggtgtgttggccgtactggaatttacgaacgatcggattaagcaatgtaatatcctttctctttcttagacagtaccttacggcactggtgttaataccgcttcttctgcgcatcctcgcgactaatgacaaccctaacccagctctatgtgggtaaagcctctcattagccgcgcgaacctctgcaacggaagatcattcatagcaacaatacattagtttccagtgaattgctgccgtcagcttgaaaaaaggggccactcaggcccccttttctgaaactcgcaagaattagcgacgcagacccaggcgctcgatgagctgggtgtaacgtgctacgtctttacgtttcaggtagtcgagcagtttacgacgctgagaaaccatgcgcagcagaccacgacggctgtggtgatcttttttgtgctctgcaaagtggccctgcaggtggttgatctgtgcagtcagcagtgctacctgaacttcggtagaaccggtgtcgtttgcgtcacgaccaaactcagaaacgattttagctgttgcttcagtacttagagacattttaaaactccaaagtatatagaatgaaaggacgccgatctctaattcagcgatcccagtgtacgttacgcaaagtgttaaacaatttacgcgacgttaagcggcagtattctactcgtagcgacctgttatcgcaagacggttaacattacgccgggtattcaaccaccaggcgacgaggcgcaacgcggccttcatcgtcaatttcgcccataccgataaatttgccgttctcaccttccgtgacgcgaaccagtccttccagtggcgcaccagatgtacgaaccgggttaccatttttgaagtaaacagaagacgttaacggaagattcaccaccggatagtcgctagctggactgtccattggcatcagtaatggatcaagtaactccgcggctggaatatcctgctgttcagcttgctcaacaagttcacgcaggtgctccagggtcaccatccgttcaaccggatatttacttaccgccagacggcgcaggtaaataacatgcgcgccacagccgagtttttcacccaggtcatcaatgatggtgcggatataagtgcctttactgcagtgaatttccagctccagctcattgccttcatggcgaataaacagcaattcataaacggtaatcggacgcgcttcacgcggaacttcaatgccctgacgcgcatattcgtacagttttttgccctgatatttcagtgcactatacatgctagggatctgttcgatatcgccacggaaagtatccagtgccgctgccagctgctctgcgctaaaggttaccggacgttcttcaacgatctgtccgtcggcatcagaagtatcggtacgctgtccaagacgcgcaatgacccgatagcgtttgtcggagtccagcagatactgggaaaacttcgtcgcttccccgaggcaaatcggcaacatgccggtcgccagcgggtccagcgcaccggtatgcccggcacggttggcgttatatatacgtttcactttttgcagcgcatcgttgctggacataccctgaggtttatccagcaacaaaacgccgttaatgtcgcgaccgcgacgacgaggacgactcattagtcctccttgctgtcgtccgggttaacacgacgttcttcgtcatgtttgaccacgctggtcaccaggttactcatgcgcatcccttcaaccagagagttgtcgtagaagaaggtcagttccggcacgatacgcaggcgcatcgctttccccagcaggctgcggatgaaaccagaagcttcttgcaacgctttgatgcccgctttaaccgcgtcttcatctttgtcgttgaggaacgtcacatatactttggcatacgccaggtcgcgagacatttcgacaccggaaacggtggtcatcatgcccaggcgaggatctttaatttcacgctgcaggatgagagcgatctctttttgcatttcctgcgctacgcgctgcgggcgaccaaattctttcgccataataaattctcctgacaaaaaaggggctgttagcccctttttaaaattaatttcaggtggaagggctgttcacgttgacctgataagacgcgccagcgtcacatcaggcaatccatgccggatgcagcgtaaacgccttatcccgcatggaaccctaaaaaccttaagcaatggtacgttggatctcgatgatttcgaatacttcgatcacatcgccagtgcggacgtcgttgtagttcttaacgccgataccacattccataccgttacggacttcgttaacgtcatctttgaagcggcgcagggactccagctcgccttcgtagataaccacgttgtcacgcagaacgcggatcgggttgtgacgtttaaccacaccttcggtaaccatacagcctgcgatggcaccaaatttcgggcttttgaacacgtcacgaacttccgccagaccgataatctgctgtttcagttccggagacagcataccgctcatcgccgctttcacttcgtcaatcaggttatagatgacggagtagtaacgcagatccaggctttccgcttcaatcactttacgtgcagaggcatcagcacgtacgttaaagccaaccaggatggcgttggacgccgcagccagggtggcgtcggtttcggtgataccacctacgccagaaccgatgatcttcactttaacttcgtcagtagacagtttcagcaaggagtcggagatcgcttcgacagaaccctgtacgtctgccttcaggacgatattcacttcgtgaacttcgccttcggtcatgttggcgaacatgttctcgagtttagatttctgctgacgcgccagtttaacttcgcggaatttaccctgacgatagagtgcaacttcacgcgctttcttctcgtcacgtacaacggtaacttcatcacccgcagccggtacgccggacaggccgaggatttccaccggaatggacggacccgcttccagcacttcctgacccagttcgttacgcatcgcacgaacacgaccgtattcgaagccacacagaacgatatcgcccttgtgcagagtaccttcacgtaccagaacggtagcaaccggaccacgacctttatcgaggaaggattcgataaccgcaccgctcgccatacctttacgtaccgctttcagctccagaacttccgcctgcagcaggatagcgtccagcagttcatcgataccggtacccgctttcgcagatacgtgtacgaactggctttcaccgccccactcttccggcaggatgccgtactgggagagttcgttcttaacgcgatccggatcagcttctggtttatcgatcttgttcactgcaaccaccaccggtacctgcgccgctttcgcgtgctggattgcttcgatggtctgcggcatcacaccgtcgtcggcagcaacaaccaggactacgatgtccgttgcctgcgcaccacgagcacgcatactagtaaacgcggcgtgccccggggtgtccaggaaggtgatcatgccgttttcagtttcaacgtggtatgcaccaatgtgctgggtaatgccgcccgcttcgccagaggccactttcgtactacgaatgtagtccagcagagaggttttaccgtggtcaacgtgacccatgatggtcacaaccggcgcgcgcggttcagccgcagcacccgtgtcacggtcgctcattaccgcctcttccagctcgttttcacgacgcaggataactttatggcccatctcttcagcaaccagctgtgcggtttcctgatcgataacctggttgatggttgccattgcgcccagtttcatcatcgctttgatgacctgagagcctttaaccgccatcttgttcgccagttcgccaacggtgatagtttcgccgatcacaacgtcacggttaacggcctgagcaggcttctggaagccttgctgcaggctagaacctttacgttttccgcctttaccgccacgtactgctgcgcgtgcttcttcacgatcagctttactttcagcgtgtttgttgcctttcttcggacgcgctgctttcgcgttacgaccacggccacggccgccttcgacttcacgatcgctttcgtcttctgcctggcgagcatgttgagaagtagtgacgtgataatcgctggaatcttcagtcggttccgcgttatcagtccatttgttttcttccgccatacgacgtgcttcttcagcaacgcgacgtgcttcttcttcgagtttacgacgcgcttcttcttcagctttacgcttgagctctgcagcttcctgctcacggcgggctttttcagcctgggcgtttttagtcatatcgtcttgttgattgctcactttgtctttttccgcagcttcacgtttcgcttgttcagcagcttcacgcttagcttgttctgcggcctcacgttcagctttttgttgcgcctcgcgtttagcgctttcttctgcctcacgacgggcttgctcttccgcttcacgctgcgcttgctcttccgctgcaaggcgttcagcctcttgcggatcgcgtttcacaaaggtgcgtttcttgcggacttcgatttgtacgcttttgctttttccaccggtaccaggaatgttaagggtgctgcgtgttttacgttgcagcgtcaatttgtccgggccactatttttctgattcaggtggtcaatcaaagtctgtttctcttgtgcagacacagagtcgtcagcagacttccggatacctgcatcagcaaattgctgtaccaggcgttccacggaggtctgtcgctctgcggccagcgttttaatcgttacatctgtcatgctgttccttcctgctacagtttattacgcttcgtcaccgaaccagcaaatattacgggcagccataatcagtgctccggctttttcgtcggtcaacccttcgatatcagccagatcatcaatgccctgttcggcgagatcttccagcgtacaaacgccacgggcggccagtttgaatgccaaatcacgatctaccccttcaaggttcagcagatcgtcagccggtttgttatcaccgaggctttcttcctgggcctgtgcaatggtggccagtgcatttttagcacgctcgcgcagtgcttcaacggtcggctcatcaaggccttcgatttccaacagctctttcatcggcacataggccaattcttccagcgtgctgaagccttcttctaccagaacagtcgcgaagtcttcgtcgatgtcgagatatttggtgaaggtgtcgatcgctgcgtgcgcttccgcctgatgcttagcctgcaggtcgtcaacggtcatcacgttgagttcccaaccgctcagctggctagccagacgcacgttctgaccgttacggccaatcgcctgcgccaggttaccggcttcaacggcgatatccatggtgtgtttatcttcatccaccacgatagaagcaacgtctgccggtgccattgcgttaatcacgaactgcgccgggttatcatcccacaggacgatatcgatacgctcgccacccagttcagtagacaccgcctgaacacgcgcgccacgcatacctacgcaagcacctaccggatcgatacgtttatcgttggttttcaccgcgattttcgcacgagaacccggatcgcgagccgctgctttaatttcaatcacttcttcgccgatttctggcacttcaatacggaacagttcgatcagcatttccggcttggaacgagtgacgaacagttgcgcgccacgcgcttccgggcgaacggaatagagcacgccacgaacgcggtcgccagggcggaagttttcacgcggcagcatatcttcgcgcaggatcacggcttcagcgttgttgcccagatccagagagatgttgtcgcggtttacttttttcaccacgccggtgatgatttcaccttcgtgttcacggaactgatcaaccaccatcgcacgttcggcttcacgcactttctgcacgataacctgttttgccgtctgggtagtgatacggtcaaaggtaacagactcaatctgatcttcaacgtaatcgcccaggttcaggctttcatcttcataacgtgcggcttcaagggtgatttccttggtcggctgggtgacttcatcaacaactaaccagcgacggaaagtgtcaaaatcaccgcttttgcgatcgatctgtacgcggacgtcgatctcttgttcatattttttctttgttgctgtcgccagcgcgctttccaatgcttcgaaaatcttctcgcgaggtagcgccttttcattggatacggcttcaactacagccaaaatttctttgttcatcgcgggcttttcacctcatccagactattaaaagtggggaaccaggttcgccttctggatattactcagcgcgaacacttcatctttaccttcgacggtaactgtgatcatttcaccgtctaccgctttgataacgccctgccatttacgacggttttgtaccgccatacggagaaccagagtcacctcttctccgacaaaacgggcgtagtgttcagccgtgaacagtgggcgatcgagacccggactggagacttccaggttataagcaacggtgatgggatcttcaacatccagcacagcacttacctggtggctcacatcagcacaatcatcaacattgatgccatcttcactatcaatatagatgcgcagtgtggatgtgcgaccgcgaataaattcgatgccaaccagttcaaaacccagggcctcaactggcgcagtaatcatctctgttaatttttgctctaatgtggacaagcccacccccaagacataaaaaaagggcctaaagcccagttattctgtagtcagataacaaaaaaccccgataaatcggggctttatataactgaaccctataaccgcaactgcggtctggagcactttccagaaggattttttcaaatcccactacgaaggccgaagtcttcacagtatatttgaaaaaggactctaagggaaagtggttgcgggggccggatttgaaccgacgatcttcgggttatgagcccgacgagctaccaggctgctccaccccgcgcctgaaacgtggcaaattctactcgttttgggtaaaaaatgcaaatactgctgggatttggtgtaccgagacgggacgtaaaatctgcaggcattatagtgatccacgccacattttgtcaacgtttattgctaatcatgtgaatgaatatccagttcactttcatttgttgaatacttttgccttctcctgctctcccttaagcgcattattttacaaaaaacacactaaactcttcctgtctccgataaaagatgattaaatgaaaactcatttattttgcataaaaattcagtgagagcggaaatccaggctcatcatcagttaattaagcagggtgttattttatgacgacgattctcaagcatctcccggtaggtcaacgtattggtatcgctttttctggcggtctggacaccagtgccgcactgctgtggatgcgacaaaagggagcggttccttatgcatatactgcaaacctgggccagccagacgaagaggattatgatgcgatccctcgtcgtgccatggaatacggcgcggagaacgcacgtctgatcgactgccgcaaacaactggtggccgaaggtattgccgctattcagtgtggcgcatttcataacaccaccggcggcctgacctatttcaacacgacgccgctgggccgcgccgtgactggtaccatgctggttgctgcgatgaaagaagatggcgtgaatatctggggtgacggtagcacctacaaaggaaacgatatcgaacgtttctatcgttatggtctgctgaccaatgctgaactgcagatttacaaaccgtggcttgatactgactttattgatgaactgggcggccgtcatgagatgtctgaatttatgattgcctgcggtttcgactacaaaatgtctgtcgaaaaagcctactccacagactccaacatgcttggtgcaacgcatgaagcgaaggatctggaatacctcaactccagcgtcaaaatcgtcaacccgattatgggcgtgaaattctgggatgagagcgtgaagatcccggcagaagaagtcacagtacgctttgaacaaggtcatccggtggcgctgaacggtaaaacctttagcgacgacgtagaaatgatgctggaagctaaccgcatcggcggtcgtcacggcctgggcatgagcgaccagattgaaaaccgtatcatcgaagcgaaaagccgtggtatttacgaagctccggggatggcactgctgcacattgcgtatgaacgcctgttgaccggtattcacaacgaagacaccattgagcagtatcacgcgcatggtcgtcagttgggccgtctgctgtaccaggggcgttggtttgactcccaggcgctgatgctgcgtgactctctgcaacgctgggttgccagccagatcactggtgaagttaccctggagctgcgccgtgggaacgattatagtatcctgaataccgtcagtgagaacctgacctacaagccagagcgtctgacgatggaaaaaggcgacagcgtgttcagcccagatgatcgtattggtcaattgaccatgcgtaacctggatatcactgatacccgcgagaaacttttcggttatgccaaaactggcctgctttcctcctctgccgctagtggcgtgccgcaggtggagaatctggaaaacaaaggccagtaattcgacatcaaccctgcccttcaggggtggggttaccttgcttatcctctgtaaactcctttctgagcatcacataatcgaaaacatcatggtttgcatccacaacccgactgtctcctttatagtgtgcaatcacttcctcaagcgtttgcggctgttccggctttgttacccccatccacgcattaataaggtaattattgtaagctgtgctaaagatgttgttttccgttgtgcgatccacgccatccccaagaacggggctataccagataaacatcgggacatgatatgcctgctggctagcctccctgcctccatgaaaatagacgttcttcttcgtagggtcacgttccaggccgtggtcggcaaaatacatgacgctggcgcggcgatcttttaataattcaaaaacctgacctagcaaactatctgtgtaatgaatggagttgtcatagcaggcatcctgatcgtcctgcggttgaaacacggcgctggattgcggataggcgctacaagccggttcatggcttccatttaaatgaagaacaatcagtttcttttgctgcgtattttgctgtaatgcttggcttaaatgcggcaacaacaattcatcaaatcctctgacataaactgtttccatggcgcgcatggcgatactggtaactgctgtaccattctgccgaaaagcggattggctgcttagccagaaagtctgaaatcctgcttgattagccatattaataatgttgtcggggtaattatgaatgtcatgactcaaaacagaatcagcagttaaagaaaggggaacgctcagcgcagtgtaaggtgcgccgcttattgcttgattaaacagtttgatctgttttctttgtgcttcaacttgcggtgtcgtagagcgtgtatatccatacaaagacatattgtcgacacgtacagactcccccacaatcaacacgtaggtatcaatacctgtatccctgacacttaattgaaaatacggcaccgtgtttgcaatactgagtaatctttgatgctctttcgctgctaaagcaaaatagttgagattgaaaaacggcgtataggtagcaaatcggctcgctagtatatatggactgaacgcttttttattttttgcatctttataagcaaattgacaagcggaaaataaactgccgctaatgacaatcagcaataatattcctgtcactttttttgtcggcaaggaaacatcatattttattattactgccaaaaaaagaagggataaaaaagcaaaggcacatagataagggatatacatccccagcattttgacaacttcatccggatcactctggagcacactaatcgcaaatccatcattgaaagttgtaccaaaggtacaccaactatagaggctaatactcatgtctgccgcagtcagtaacacaaatggtgcggcaacaagcaggcgaagcggaagggaacttatacgttttacaaccaggatggtcagaacgaagaacagcaagcgctgaaccatatgcgctccggaagaagcgactaagttcgtaataccaaaaacaataacacaaagatacaacaaccaatgagatttaaaagttctagcaaatttgttgaatactgtcatccagaaatccaagttcacaaccaatataaacaattatcaacaatgtttaattttatatcagacatgtttttcaactctgatccatatcagaacgaaacactgttagttttttctttttaaatgatgcggccattgcgttctcagtaattaaataacattatcaatgcgtctctaaacattacgcagaacgtagccatcagtcgttatactgacaggagcaggatggtttatcgagaagtaaacatatccgtattcgtaccggaactggagttgacacaataaagtgccaattatgtcagtagaagggaaaaatttataactaaggcgtaccggcaccatcgtttcaaggtaccagctacgagtaaagcaactggacgagatacagatacctgacaaccattcctcagaccaggaccaaaacgaaaaaagacgcttttcagcgtctcttttctggaatttggtaccgaggacgggacttgaacccgtaagccctattgggcactaccacctcaaggtagcgtgtctaccaattccaccacctcggcacggatactactttttagttcgggatatcgctggtcggcttagccggagcagctggctgagtttgttcggttttcgccggtgcactcagattttcccattcgctacctttattggttttgttgctattgatgttacccagcaccagactgatgatgaagaataacgttgccagcagcgccgtcatgcgggtcatgaagttaccagaaccactactaccaaacagcgtagcggaagcgcctgctccgaaggaggctcccatatcagcgcctttaccttgctgcagcatgatcagaccaacaaggccaattgccacaataaggaaaactactaaaagagcttcatacataatcaacctgttccttgcggagttgccgcgtaccaatgcttcaaccaataaagcgggagtttttaatctttcccactgaagcgggtgtgaatactaaccaaagcgaatgaccttcgcaagggcaattttatcgcattgtatcaactgcggaaaaaaacagcaaaaccgatgtgttcgctgagaaaaaaggcgacaatcgccgcctttttagccagttatctaacgctttaaacggcttttactgcatcggcgatgcggtgtgcaaattcagtcacctgcgcttcgtcttcgccttccaccatcacgcgaattaacggttcggtgccggatttacgcagcaacacgcgtccacggttgcccagcgcagcttcaacctctgcggtcacggctttaacactctcatgctcaagtggatcgccgctacctgcggtgtaacgtacgttaaccagaatctgcgggaacattttcatgccgctgcaaaggtcgtgcaggctcatatggttacgtgccatcgccgccagcacctgcaagccagcaacgatgccgtcaccggtagtagttttatccagcaggatcacatgaccggaattctctgcaccgatacgccagcctttctcctgcattttttccagtacgtagcggtcacccactttcgcgcgcgcaaatggaattcctaactgtttcagcgccagttcaagccccatgttgctcatcaatgtacccacagcgccaccacgcagctggccctgacgaagaccttcacgcgcgatgatatacatgatctgatcgccatcgactttattgccttcatggtcaaccataatcacgcgatcgccatcgccgtcgaaggcaataccgagatccgctttttcagccagcacacgagcctggagcgcgcgaacgtcggtagcccccacttcggcattgatgtttacaccgtttggctcacaaccgatagcgataacgttcgcccccagttcgcgcagcacgttcggcgcgatgtgataagtcgcaccgtttgcacaatccaccacaatcttcagttcactgaggctaagttcgttcgggaacgtggctttgcaaaactcgatatagcgacccgcggcatcaacgatacggctggctttacccagttctgcgctatcaacgcagctgatctccttttccatttccgcttcgatggcctcttctaccgcatccggcagtttggtgccgtcgatagagaagaatttaatgccattatcgtagaacgggttatggcttgcagatatcacaattccggcctctgcgcggaaggtacgcgtcagataagccacggccggtgttggcatcgggccagtgaagagtgcggaaaggcccgctgccgccagacccgcttccagtgcactctccagcatatagccagaaatacgcgtgtctttaccaataataatcttacgggagccgtggcgcgccagcactttacccgcggcccaacccagcttaagcacaaaatcaggtgtgatcggcgcatcccctacacgaccacgaatcccatcggtaccgaaatatttacgattactcatagcgtttgttttcctttgcagacagagtggcttccaccacccgcatcgcttctacggtttctttgacgtcatgaacacgaatgatgtgcgcgccttgcattgcggcaatgaccgcacaggccagactaccgctcaggcgctcggacggccccacgttcagcagctgcccaatcatgctttttcgactcatacccaccaacagcggcaggttgaaatggtgaaattcagccaggcgcgccagtaaactatagttatgggagagatttttaccgaaaccgaatccggggtcgagcaacaatttctcttttgcgatacccgcctgctcgcaacgtgctatttgctcaataaagtagcgattcacttctgcaaagacatcgtcatacttcggagcttcctgcatggtttttggatttccctgcatatgcatcagacaaaccggtaaaccggtttctgcagccgcctccagagcgccaggttcggaaagggagcggatatcattaataatgtgagcgccaactttcgcactctcacggatgacttctggtttggatgtatcgacactgatccagacttcgaagcgttgagcaattgcctcaaccacaggaataacacgttgcaactcttcttcaacgctaacttccgccgcccctgggcgcgtggactcgccaccaacgtcaatgatcgtcgcgccagcgttgatcatcagattcgcatgtttcaccgcatctatcaggctgttatgcgtgccaccatcgctaaaggaatcaggcgtgacgttgaggatccccattacgtgaggatggctaaggtccagactagtaccctgggcaaagagtttcatgatgttatccctggtatgaattgataagaaaaaaccccggagcacgccccggggttttcggtacaaatacagtcatctgatgcgggaacttacttgtcgcctaactgctcactcatggtgttacccgggttcggcgtacgcggttcatcaaccggacgaggagcctttggactaccattgtcgccagaattgttagaagcgcctggttcttcccagcccgctggcggacgtacatcgcgacgtgccatcaggtcatcaatctgcggtgcgtcgatagtctcatatttcatgagagcatctttcatcgcatgcagaatatccatattgtcggtcagaagctgacgcgcacgattatagttacgctcaatcagtgctttcacttcctggtcgatgatacgtgcagtttcatcggacatatgtttcgctttcgctacgctacggccgaggaacacttcaccttcttcttccgcgtacagcagtggacccaatttctcagagaagccccactgagtcaccatgttacgtgccaggttggtcgcaactttaatatcgttggacgcaccggtagatacatgttccggcccgtagatgatctcttctgccagacgaccaccgtacagcgtagaaatctggctttccagtttctgacggctggcgctgattgcgtcgccctcaggcaagaagaaagtcacacccagcgcacgaccgcgtgggataatcgtcactttgtgcaccggatcgtgttccggcaccaggcgaccgataatcgcatgacccgcttcgtggtaagccgtgctttctttctgcgcttccgtcatcaccatggagcgacgttccgcacccatcatgattttgtctttcgctttctcgaactcaaccatgctcacaacgcgtttgttgccacgagcagcgaacagtgccgcttcgttcaccaggttcgccaggtcagcaccggagaaaccaggagtaccacgggcaatgattgccgcgtcgatatcgggtgccaatggtacgcgacgcatgtgaactttcaggatctgctcacgaccgcgaacatctggcaagccgaccacaacctgacggtcgaaacggccaggacgcagcagggccgggtcgagaacgtccggacggttagtcgcggcgataacgatgataccttcgttaccttcgaagccatccatctcaaccagcatctggttcagagtctgttcacgttcatcgtgaccaccgcccagaccagcgccacgctggcggcctacggcgtcgatttcatcgataaagatgatgcacggtgccgctttcttcgcctgttcgaacatgtcacgaacacgggatgcacccacaccgacgaacatttctacgaagtcagaaccggagatagtaaagaacggaactttcgcttcgcctgcaatcgctttcgccagcagcgttttaccggtacccggaggaccgaccatcaagacgcctttcgggatcttaccgccgagtttctggaagcggctcggctcgcgcagatactcaaccagttcagcaacttcttcttttgcttcgtcgcagcccgcaacgtcagcaaaggtcgttttgatctgatcttccgtcagcatgcgcgctttgctcttaccaaagctcatggcacctttgccaccgccgccctgcatttgacgcatgaagaagatccagacaccaatcagcaacagcatcgggaaccaggagatgaagatagaagccagcaggcttggttcttcaggcggttcaccgacaaccttgacgttcttggtcaacaggttatccagtaatttcggatcctgaaccggaatgtaagtggtataacggttactatctttcttggtaacgttgatttcacgtccgttgatacgcgcttcacgaacctggtcgttattgacctcttgtaggaaggtagagtaatccaccttacggccattagactcgctgggcccaaagctctggaatacactcatcagcacaacggcaatgaccagccagagtattaggtttttcgccatgtcactcaagggattaacctcttattacaactgtgttaaaaacagcgtcaggatactctatatccagcatctttcaaactttcgtctgaaatctcccggttagggtttacgcccggtcgctacaatatacacttcccggctacgtgcacgagaagagtccggcttacgaactttgaccttcgtaaacagggagcgaatttcccttagatactcatcgaaaccttcgccctggaacaccttcactacaaaactgccacctggcgctaatacatcacgacacatttctagcgccagttccaccagatacatggcacgggggatatccaccgccggtgttccgctcatgtttggtgccatatcggacatgacaacctggactttgctgtcgccaacgcgctccagcagtgctttcatcaccagttcatcacgaaaatcgccctgaagaaagtccacaccaacgataggatccataggtaaaagatcgcaagcgatgatgcggcctttgccgccaatttgggtgaccacatattgactccaaccacccggagcagcaccaaggtcgacaaccgtcattcccggtttaaagagtttgtcactttgctgtatttcatcaagtttaaaccaggcacgggaacgtaacccctttttctgtgcctgttgaacatatttatcgctaaagtgttcctgaagccagcggctggagctggcagaacgcttcttacctgtcatttaactttcccatggggataactcatcgtaaccaattgcgtaaatttttacgcgcctatttggtgatatatgggagatggcggtagaatgacccgttttcaatcccaacgtaagcaaaaaatacgatgaatctgagtactaaacaaaaacagcacctgaaaggtctggcacatccgctcaagccagttgttctgcttggcagtaatggtttgaccgaaggggtgctggccgagattgaacaagcgttagagcaccatgaactcatcaaggtgaaaatcgccaccgaagatcgcgaaactaaaaccttgatcgtggaagctatcgtgcgcgaaaccggcgcctgtaatgtacaggtcatcggtaaaacgctggtgctttatcgcccaactaaagaacgtaaaatcagcctgccacgctaagattatcctaaagttacacacatttgctgtgtaaaacgaggggttttccgcaggcaggagagcaaaatgccacgctctgttcgttgataaaaggccgcatagcggcctttttcctttctttacaatacatcaacatcttgagtattgggtaattcttacaggtattccaccttaattacttcaaattctacttcgccgcccggcgttttgatgaccacaacatcatcttcttctttgccgatcaggccacgagcaatagggctgtttacagaaatcaggttttgtttaaagtcagcttcgtcatcgccaacgatgcgataagtctgttcttcgtcagaatccagattcagcaccgttacggtagcaccaaaaataacgcgcccattgttgggcattttggtgacatcaatcacctgcgcgttgctcagcttggcttcgatgtctttaatacggccttcgcagaaaccctgctgttcacgagctgcgtggtattcggcgttttctttcaggtcgccatgctcacgcgcttccgcgatagcagcaatgatttcaggacggcgcacagatttcagaaaatccagctcttcgcgtaatttttcagcgccgcgtaaggtcatcggaatagcttgcatttgttatacctcttgaatattcctgatagggcaagtcttcacccaccccggctgttcggcctgcccggcataactccttaccgggaccagaagcaaaaaaataccgacccgggtacaagtcccaggtcagctacaattcacattttgatagtcattttaccctgaagttcccgaagggtcatcgtttactttatagggcgttgcgccgtagtatgacggctcgattccaggttgttagcgcgagattatgcgattttccagatttatcatcggattgaccagctgtatagcgttcagtgttcaggccgcaaatgttgatgagtacattactcaactccccgctggtgccaaccttgccctgatggtgcaaaaagtcggcgcgagcgcccccgctattgattaccacagtcagcagatggcgctgcctgccagtacccagaaagtgattactgcgctggcggcgttgattcaactcggccccgattttcgttttaccacgacgcttgaaaccaaaggcaatgtggaaaacggcgtacttaagggtgacttagtggcgcgatttggtgccgatccgacgttaaaacgtcaggatattcgcaatatggtcgcgactttgaaaaaatctggcgtcaaccaaatcgatggcaatgtgttgatagatacctccattttcgccagccacgataaagcccccggctggccatggaatgacatgacacaatgctttagcgctccgcctgccgccgccatagttgaccgcaactgtttctccgtcagcctctacagtgccccaaagcctggtgatatggcttttatacgcgtggcatcttattaccccgttacgatgttcagccaggtacgcaccctcccccgtggttctgccgaagcgcaatactgcgaactggatgtggtgccaggcgacctgaaccgctttacgctgacgggatgcctgccacaacgttctgagccgctcccgttggcttttgccgtgcaggatggagccagctatgccggtgcaattctgaaagatgagttaaaacaggcgggtatcacctggagcggaacactgctgcgccagactcaggttaacgaacctggaacggtagttgccagtaaacagagcgccccgctgcacgatctgcttaagattatgctgaaaaagagcgacaacatgatcgccgatacggttttccgcatgataggccatgcgcgcttcaatgtgcctggaacatggcgggccgggagcgacgccgtgcgtcagatcctgcgccagcaagccggtgtcgatattggaaacaccattattgccgatggtagtgggcttagccggcataacctgattgcccccgccaccatgatgcaggtgctgcaatacattgcccaacacgacaatgaacttaactttatctccatgctgccgctggcgggctatgacggctctttgcagtaccgtgcaggtctgcatcaggcgggcgtggatggaaaagtcagtgcgaaaaccggtagcttgcagggggtatataacctggcgggattcattaccacagcgagcgggcaacgaatggcgtttgtgcaatatctttctggctatgcagtagaacctgcggatcagcgtaatcgccgtattccgttagtgcgttttgaaagccgtttgtataaagatatttatcagaacaattaatcaaaaagaaaccccggcacatggccggggcttcagattattgacaaagtgcgctttgtttatgccggatgcggcgtaaacgccttatccggcctacaaaatcgtgcaaattcaacatattgcaattctcttgtaggcctgataagcgtagcgcatcaggctgatttggcgtttatcatcagtgattaacgcttgtaaatgaactcaacgccttcttcgtcgtcttcgtcccagtcgtcatcccagtcttcatcatcctcttcagcaatctcttcaagctgctggcgatgataatcatcccacatgaattcgactttctctggctgtttcgcttcttcagcctgcacgaccgggttttcaatgataaaggtcatcacatcccagcagagatctttcacgcccagtccactcgccgcagagatcagataatatttatcttcccagcccagcgcctcagcgatcgctttcgctttctcttcggcttctaccttatccagcagatcgatcttgttgaacactaaccaacgcggtttcgtcgccagatcctggctgtatttttccagctcgctgataataatacgcgcgttttcaaccggatcggtgccgtcaatcggatcgatatcgatgaggtgcaacaggacgcggcaacgttccaggtgcttcaggaagcgaatgcccagacctgcgccttccgcagcgccttcaatcagtcctggaatatcggcaacaacgaagctcttttcgttgtccattcgtaccacacccagacttggcaccagagtggtaaacggataatccgccactttcggtttagccgcgcttaccgcacgaataaaggtgcttttacccgcgtttggcatccccaacataccgacgtcagccagcagcatcagctccagcagcagctcgcgcttatcgcccggcgtgccgttggttttctgccgcggtgtacggttaacggagcttttgaaacgggtattgcccagaccgtgccagccgcccttagcaaccagcagacgctgaccgtgtttggtcatatcgcccatggtttcaccagtaccctggtcgattacacgcgtacctaccggcactttaatcgtcacgtctttaccgcgcttaccggtacagtcgcggcttgcgccattctgaccgcgctctgcacggaaagatttttcaaaacgataatcgataagcgtgttcaggttctcgtcggcttccatccatacgtcaccaccatcaccgccgtcgccgccatccgggccgcctttcggaatatacttttcgcggcggaagctcacgcaaccattaccgccatcacctgcaacgaccagaatgcttgcttcatcaacaaacttcattttattctccgtaaatcattcgcctgcgcggggttggcttaccaccgttgtatgcttacgtaatccgccccaaatacgatgaccaatggcggaatacatcgcgcccgcaaccacgacaaacgcaccgagataacctaaaaggtttaacatcggtctggcgaagaaatcgggccaggccagacttaaaagatcactaaaaaacagcgtaaacagtggggtgagcgtgatgatcgcgctcacctgcgctgcctgccagcgagccatcgcttccgccagggcgccatatcctaccaaggtattcagtccgcaaaaaattaaacatgcgagctgccagtggctaagctgcgctatcactccaggctttgccagagggaagagcgcaattgtacataaagtgtacagtaaaaacaggatctgcggactggccagccgacgcaataaaaccttttgcgccacgccataactcacccaaaccgtcgccgcaccgaccccaaagataactccccaggtgtaatcggtgagctttgtaaatatctcgaccagactggtgttaaaaaacatcaccaggccgctcaggagcatcaatgcccctacaacctgagtgctgcgcattttctctttgaggataaatacgctggcaaccatcatgccaactgggctgagttgcccaatcacctggctagcggtcggactcaggtattgcaaggaactgctgaacaggatgaagttcccaaacagcccggcggtcgccactgccaacaaaatcaaccagcgtggcttacgaaacacgcgtaatggcggcaacctcttcttcaccgcaagaatggcacccaggccaatactcgccatcaagaaacggtaaaacacgattgtcggaggttccatcacctccagcacctgcttcattgcgattggcaacgccccccagcaaattgctgtggtgagcgccaaaagaatgccaatgcctgcctgctgcttcataccgtattccctgcaaagcgcatttgcggattaacgtcgcaccatgcgcatttttaccggttatcgaatgtaaaaagccccgcaacgtgttgcggggctttcatccgttaccgggacgcgaaaaacttattcagcttcgatgctgataaatttacggtttttcgggcctttaacttcgaatttcactttaccgtctgctttagcaaacagagtgtggtcacgaccgcaacctacgttagcgccagcgtggaatttggtaccacgttgacgaacgatgatgctacccgccagaacggattcgccaccgaaacgcttaacgcccaggcgtttagcttcactatcgcgaccgttacgtgtggagccgccagcctttttatgtgccatttgaaatctctcctcaggtcttaggcgctgatgccagtaattttcacatcagtgaaccactgacgatggccctgctgcttacgatagtgtttacgacgacgaaacttaacgattttaactttctcgccacgaccgtgagcaacaacttcagctttgattacgccgccatcaacgaaaggaacgccgattttgacttcttcaccgtttgcgatcatcagcacttcagcgaactcaacagtttcgccagttgcgatgtccagcttttccaggcgaacggtctgaccttcgcttactcggtgttgtttaccaccactttggaaaaccgcgtacatataaaactccgcttccgcgcacaccttttcaatgattcagagtgcgctataaatattcacaatagggcgcgaatattacgcaaaacgcacgcctttgacaagtgctacagtcaatacacgaagaaaaaaaacacaacttgtacggtaacgtttatctgtgccattttttcagtacaatcaccctatattcctaaccataaaccctaagttgcctttgttcacagtaaggtaatcggggcgaaaagcccggcttttgcgatgaatttagaaaaaatcaatgagttaaccgcgcaagatatggcgggtgttaatgcggcaatccttgagcagcttaattccgacgtccaactgatcaatcagttaggctattacatcgtcagcggcggcggtaaacgtattcgtccgatgattgctgtactggctgcacgagctgttggctatgagggaaatgcgcatgtcaccattgctgccctgatcgagtttatccacacggcgactctgctacacgacgacgttgtggatgaaagtgatatgcgcaggggtaaagctaccgccaacgccgcatttggcaatgccgccagcgtgctggtaggcgattttatttatacccgcgctttccagatgatgaccagcctcggtagcctcaaagtgctggaagtcatgagtgaagccgtaaacgtcatcgcagaaggtgaagttctgcaactgatgaacgttaacgatccggacatcactgaagaaaactacatgcgcgttatctatagcaaaaccgcgcgtctgtttgaggctgccgcgcagtgttccgggattctggctggctgtacgccggaggaggagaaaggcctgcaggattatgggcgctatctcggcactgctttccagttgatcgacgatttactcgattacaatgccgatggcgaacagttaggtaaaaatgtcggcgacgatctgaacgaaggtaaaccgacgctgccgctgctgcatgcgatgcatcatggcacaccagaacaggcacagatgatccgtaccgccatcgaacagggtaacggtcgccatcttctggaaccggttctggaagcaatgaacgcttgtggatctcttgaatggacgcgtcagcgtgccgaggaagaagcagacaaagccatcgcagcgttacaggtgctcccggacaccccttggcgagaagcactcatcggcctcgcgcacatcgctgttcaacgcgatcgttaatcccctcccctcatcccgcgcagcgcgcgggatggttccagtaagttccataaaaacacttattcagctctataacacctgaaaaatagggatgtgcatctttatatattctgaatattcacactctttacaggaactttttagagcaataggccatcaggagtatagtgatgctcgacagaagaagtgttctgaatgaaagcgactaacttaaggagtgaggaaaaatggaaagtaatttcattgactggcatcccgctgacatcattgcgggtttgcgcaagaagggaacgagtatggcggcggaatctcgcagaaatggtttgagttccagtacgctggcgaatgcattaagccgcccatggccgaaaggagagatgattattgcgaaagccctgggaactgacccctgggttatctggccaagtcgctaccatgatccgcagacccatgagtttatcgacagaacgcagttgatgcgtagctacactaaaccgaaaaaatgagtggtctggcggtagccccgcgaacggggctgccagctctcagacgattattcgcctttcacacgctcaatatttgcacctaaagcgcgcagtttgtcttcaatgcgttcgtagccacgatcgatgtgataaatacgatcaaccaccgtcgtcccttccgcaatacagccagccagcaccaggcttgcacttgcacgcagatcggttgccataacctgtgcgccagaaagtttttcaacaccgtgacaaataacggtattgctttcgatttcggcgtgcgcgcccatacggctcagctctggcacatgcataaagcggttttcaaagaccgtttcggtgataaacccggtcccttctgccaccaggttcaacagcgtgaactgggcctgcatatcggtcgggaatgccggatgcggcgcggtacgtacgttaacagccttcggacgtttgccatgcatatccaggctaatccagtcttcgccgacttcgatgtccgctccagcgtcacgcagtttcgccagcacggcgtcgagagtatctggctgcgcgttacggcagataattttgccgcgagaaatcgccgccgccaccaggaaagtaccggtttcgatacgatccggcagaacgcgatagacaccgccgcctaaacgttccacaccttcgatgacgatacgatcggtgccctgaccgctaattttcgcacccagcgtaatcaggaagttcgcggtatcgacgatttccggttcacgcgctgcgttttcaataatcgtggtgccttccgccagggttgcagcacacatgatggtcaccgttgcgccaacgctgactttatccatcacgatatgtgcacctttcaaacgaccatcgacggaagctttaacgtaaccttcttccagtttgatggtcgcgcctaattgttcgaggccagaaatgtgtagatcaaccggacgcgcaccgatcgtacaaccgccaggtagactaacttgcccctgaccaaagcgcgctaccagcggccccagcgcccagatagaagcacgcatggttttaaccagatcgtaaggtgcgcagaatacattaacgtcgcgggcatcaatatgcacagaaccattacgttctactttcgcacccagctggcttagcagcttcatacttgtatcgacgtctttcagtttcgggacgttctggatctctaccggttcttccgccagtagtgcggcaaaaaggataggcagagcagcatttttagcgccggaaattgtgacttcgccctggagcttcgttggcccctgaacacgaaatttatccatttagtttgttctcagttaacaattcatatccgctaccggcgaatcgcccatagctcaaaagccgttcagtttgcgatcgcgcgcccactccgcaggggtatacgctttgatgctcacagcatgaatgcggttatccgcaatatattccatcagcggaccatagaccgtctgctgttttttaacccgactcatgccgtcaaacaactcacccacggcaataacctgaaagtggctgccatcgccggaaacgtggacttcctggagggagagagcgttcatcaacacgctctgaatttcattattttccatgggatcttcaatcatcagttaataaaccagcgaaacatcttagagcaaagttgcgctggcataaataagcaaaaagcctcgctgataaatcagacaaggctcgacttgcaggcaggtttgccggacaggcggttaacgccatatccggcctgaaaaaatttaacgaggcagaacatcagcaggcaaattatacaatttcgccagggtatacactttgtcgtttaccccctgaagcgtcacattgttgccctgctttttcgccagatcgataagatggagcagcagtgccagtccccccgtatccacgcgggagacacggctaagatcgatgcaggtaatccccttcaccgcttcctcacgcatttcccaaagcggtagcaaaacgtcctgatccagctctccggataacgccagcgtgtcacccgtctgcatccagctcagactctcgctcattattttttctcttccagagtgattttctgttgagaaatgcttttcagttgcgcagtcaggccgtcgatacctttggtacgcagcagcgttccccactcgttttgtttggtggtgatcatactgacgccttcagcaatcatgtcgtaagcctgccaattgcccgtctgggagtttttacgccactggaagtccagacgcaccggcggacggccattcgggtcaataatggtaacgcgaataggcacaatggttttatcgcccagcggctgttctggcgcaatctgataggtttgaccgtgatacatcgccagcgcctgaccgtaagcctgcttcaggtactcacggaaagcggcaaagtaggcttcacgttgagcaggggtcgcactcttgtaatactggcccagcaccagcgcaccggcgtatttcacctgtacgtatggcagcagttcctgatcaacaatggtacgcagataatccgggttggcccgaatttgcggttgctcattcttcaggcgatcgaacgttttctgcgccgcctcgtccatcagcttatacggattggtctggtctgccgcggttgccgcactcagaggtgcaatcaccagcaaagcgaccatcattaaacgtttaaacatgcgtcggttctcctgaaattatttcgttgtacccacaggttcagtggtttcattattacctggcgcagcagctggcgcatcgccactattcttattgtcatcgcctttactaccgtaaaggaactgaccaatgagatcttccagcaccatcgcagacttagtgtcctgaattgtatcgccatccttcaggatagcagtccccagttccgggtcttcaaaaccgacgtttaatgccagatattgttcccccagcaggccggaagtacgaatgctcaggctactggtatctggaatgtggttataacgttgttcaatttccagcgttacgcgcggcagataggttttcgggtccagcgtaatatccgccacccgacccacaacaacgccaccaatactgaccggagagcgcgctttcaggccgccaatgttatcgaacgtcgcataaagcgtgtaggtcggttcagtacgtatggacgtcacgttcgccgccttcaggcaaacaaacagcgccgccagcagtgctgctaataaaaagatacccacccaaatttcattttttttcgtttgcatgaactcaattcccaaacatcaatgcggtcagcacaaaatccagccccagaacagccagagagctgtggacaacggtgcgagtggttgcccggctaatcccggcagacgtcgggatggcgtcgtagccgttaaacaagctaatccacgtcaccgtgatggcgaacaccacgctcttaatcagacagttgaccagatccatacgccagtcgacggcattttgcattgcgctccagaagaacccgctatcaatgcctttccaactgacgccgaccagagatccgccccagatccccacggcgacgaaaataaccgtcaacagtggtaaactaataaccccagcccagaaacggggagaaataacccgacgcagcggatccaccgccatcatctccatactggagagttgctctgtagcgcgcatcaggccgatttctgcggttagcgcgctaccagcacgcccggcaaacaacaacgcggcaaccaccggccccagttcacgcagtaggcttaacgccaccagcatacccagactggtttccgcactataagtggtcagaaccagataaccttgcagccccaacaccattccgatgaacacgccagaaaccacaataatcagcatgctcaggacgccgacattatagagctggcgcaccagcagcggcgcatgtttgcgaaattccggtttgccgaccagcgcattgaataacattaacccggcccgcccgaacgttctcagggttttaatccctttatgtccgaggctcgccagcgcatttaacagcatgagtggcttaactccctggtaaaagatcagcgtgataatcgccggcaggatagcggaacggaacaggcccgtcagctatcccgtccagaaactgacgtacgcgcggatcaggattcgcctgcaacgcctgggcactgccatgagcgacaatttttttgtccgccaggatccaggcgtgatccgcaatacttaacacttccggcacatcgtgagaaaccaccacacaagtcacgcccagcgcgctgttcagctcagaaatcagcttcaccagtacgcccatggtgatgggatcttgcccaacaaaaggttcatcaaacatgatgagatccggctccagcgcaatcgcacgcgccagcgctgcacgccgcgccatcccaccggaaagttcagaaggcattagtttagccgctccacgcagccccacggcctccagcttcatcatcaccgtactatgcaacaatggcgcgggaagttgggtatgttcgcgcagtggataggcgacgttgtcaaatacgttcatatcagtgaacaacgccccggactgaaataacatgctcatccgtttgcgcactgtatacaggcggctacgagacatcgccggaatattctcaccatcgaaaaggatctcaccatgatctggtgcgatttgcccgccaatcagacggagtagcgtcgttttaccgatgccgcttggccccatgatcgccgtgatcttccctcgcggcacggtcagggaaatattatcgaagatgcagcgattgccacgcgtaaaactgacatcgcgcatatcgactaaattcgccacagactgctccataattcacccttcgtcttgcgttgattttctaagcatggcgctcaatttaaccttgaacccaacatatttacagaatattacccgccgtggttagcgaaagctggcatttgttttactttttagccgcataaagtcaaaattaagcatccgttacggctttctgaaaatcttcagcggaccggcgagtatacctgaagaaaggacgttagatgcttttagctacggcactgttaattgttggtttacttttggtcgtttacagtgccgaccgcctggtttttgccgcgtctattctttgccgaacctttggcatcccgccgctgatcatcggcatgacggtggtcagtattggtacaagcttaccagaagtcatcgtcagccttgccgcgtctctgcacgaacaacgcgatttagccgttggtacagccctcggcagtaacattatcaatatattgctgatcctcggtctggctgcgctggttcgtccttttaccgtccattctgatgttctacgccgtgaattacccttaatgttgttggtcagcgtggtggccggttccgtactctatgacggacaacttagtcgcagcgatggtatctttctcctctttctggctgtgctatggctgctgttcattgttaaacttgcacgtcaggctgaacgtcaggggactgacagcctgaccagagagcagcttgcagagctgccgcgtgacggcggattgcccgtcgcgtttttatggctcggcattgcgcttatcatcatgccagtggccacgcggatggtggttgataacgccacggtgctggcgaattactttgccatcagcgagttgacgatgggtctgacggcaattgctatcggaaccagcctgccggaactggcaaccgcaatagcgggggttcgcaaaggtgaaaacgacattgctgtcggaaatatcattggcgcaaacatttttaatattgtcatcgtgttgggtttacccgcgctgataacgccaggagagattgatccactggcgtacagtcgtgactacagcgtgatgttgctggtgagcattatttttgcgttgctgtgctggcggcgctccccgcaaccgggccgtggtgtaggggtattattaactggcggatttatcgtatggctggcgatgttgtactggttaagcccaatactcgttgaataactggaaacgcattatgagccacgtagagttacaaccgggttttgactttcagcaagcaggtaaagaagtcctggcgattgaacgtgaatgcctggcggagcttgatcaatacatcaatcagaatttcacgcttgcctgtgaaaagatgttctggtgtaaagggaaagttgtcgtcatggggatgggaaaaagcgggcatattgggcgaaaaatggcggcaacgtttgccagcaccggtacacctagttttttcgtccatcctggtgaagccgcgcatggtgatttaggcatggttaccccacaggatgtggtgattgctatctctaactctggtgaatccagcgaaatcacggccttaattccagtgcttaagcgtcttcacgtaccgttaatctgcatcaccggtcgcccggagagcagcatggcgcgcgccgcagatgtgcatctgtgtgttaaagtagcgaaagaagcctgtccgttagggctggcaccgaccagcagcaccaccgccacgctggttatgggcgatgccctcgctgtcgcgctgttaaaagcacgcggctttactgctgaagattttgcgctcagtcacccaggcggcgcactgggtcgtaaacttctgctgcgcgtaaacgatattatgcatacgggcgatgagatcccgcatgttaagaaaacggccagtctgcgtgacgcgttgctggaagttacccgcaaaaatcttggtatgactgtcatttgcgatgacaatatgatgattgaaggcatctttaccgacggtgatttacgccgtgtcttcgatatgggcgtggatgttcgtcagttaagtattgccgatgtgatgacgccggggggaatacgtgtgcgccctggcattctggccgttgaggcactgaacttaatgcagtcccgccatatcacctccgtgatggttgccgatggcgaccatttactcggtgtgttacatatgcatgatttactgcgtgcaggcgtagtgtaaagattcaaggataaacaacaatgagcaaagcaggtgcgagccttgcgacctgttacggccctgtcagcgccgacgttatagcaaaagcagagaacattcgtctgctgatcctcgatgtcgatggcgtactgagtgatggcctgatttatatgggcaataatggcgaagagctgaaagcgttcaatgttcgtgacggttatggcattcgttgtgcgctcacctctgatattgaagtcgctatcattaccgggcgaaaggctaaactggtagaagatcgttgtgccacattggggatcactcacttgtatcaggggcagagtaacaaactgatcgcctttagcgatctgctggaaaaactggcgattgccccggaaaatgtggcttatgtcggcgatgatctcatcgactggccggtaatggaaaaagtgggtttaagcgtcgccgtggccgatgcgcatccactgttgatcccgcgcgccgattacgtgacgcgcattgctggcggtcgtggcgcagtgcgcgaagtttgcgacttattactcctggcgcagggcaaactggatgaagccaaagggcaaagcatatgagtaaagccagacgttgggttatcattgtgctaagtctggcggttctggtgatgatcggcattaatatggccgaaaaagacgataccgcccaggtggtcgtcaacaacaatgatcccacctataaaagcgagcatacggacacgctcgtctataacccagaaggggcactaagctatcgattgattgctcaacacgttgaatattattccgatcaggccgttagctggtttacgcagccggtacttaccacgtttgataaggataaaatcccgacatggtccgtaaaagcagataaagccaagctgaccaatgaccggatgctctatttatatggacacgttgaagtcaacgcacttgtgccagactctcaacttcgcagaatcacgacggataacgcgcagatcaatctggtgacgcaggatgttacctctgaagacctcgtcacgttatacggaacaacatttaactccagcggtctgaaaatgcgcggcaacttacgcagcaagaacgccgagctgattgaaaaggttagaacatcctatgaaattcaaaacaaacaaactcagccttaatcttgtgcttgccagcagtcttctggccgccagcattccggcatttgccgtaaccggagacactgatcagccgatccacattgaaagcgaccagcaatctcttgatatgcaaggcaacgtggttacctttaccggtaatgtcatcgtcacccagggcaccatcaaaattaatgccgacaaagtggtcgttacccgtccgggcggcgaacaaggtaaagaagtgattgacggctacggtaaaccggcaacgttctaccagatgcaggacaacggtaaacccgttgaaggtcacgcttcccagatgcactacgaactggcaaaagattttgtcgttctgacgggtaatgcttatctgcagcaggtcgatagcaacattaagggcgataagatcacttacctggtgaaagagcagaaaatgcaggctttcagcgacaaaggcaagcgcgtaacaaccgttctggtgccgagccagctgcaggacaaaaacaacaaaggccagaccccggcacagaagaagggtaattaattcgttatggcaacattaactgcaaagaaccttgcaaaagcctataaaggccgtcgcgtggtagaagacgtcagcctgaccgtcaactccggggaaattgtcggtctgctggggccaaacggtgccggtaagaccaccactttctacatggttgtaggcattgtgccgcgcgatgcgggcaacatcattattgatgatgacgatatcagtctgctgcctctgcatgcacgcgcgcgccgcggtatcggctatctgccacaggaagcctccattttccgtcgcctcagcgtttacgataacctgatggcggtactgcaaattcgtgacgacttgtctgctgaacaacgtgaagaccgcgcgaacgagctgatggaagagtttcacattgagcacctgcgtgacagcatggggcagagtctctccgggggtgaacgtcgccgtgtagaaattgcccgcgcactggctgcgaatccgaaatttattctgctcgacgaaccgtttgccggggttgacccgatcagcgttatcgacattaaacgcatcattgagcacctgcgcgacagcggcctgggcgtgctgatcactgaccacaacgtgcgtgaaacactggcggtttgtgaacgcgcttatatcgtcagtcaggggcatttgatcgcccacggcacgcctacagaaatcttacaagacgaacacgttaagcgtgtataccttggggaagacttcagactctgatagggtagaagtttgcgacgttttagcaggagagtacgattctgaacatgaagcaaggtttgcaactcaggcttagccaacaactggcgatgacgccacagctccaacaggcaattcgtctgttgcagttgagcacgctggaacttcagcaggagctacagcaggcgctggagagtaatccgctgcttgagcaaatcgacactcatgaagaaatcgacacccgcgaaacgcaagacagtgaaacgctggacaccgccgacgcgctcgaacaaaaagagatgccggaagagctgccgctcgatgccagttgggacaccatttacaccgctggtacaccatccggcaccagcggtgactacattgacgacgagctgccggtctaccagggcgaaacgacgcagaccttgcaggattacctgatgtggcaggttgagctgacaccgttttccgacactgaccgcgctattgctacctctatcgtcgatgccgttgatgaaaccggttatctgactgtcccgctggaagatattctcgaaagtataggcgatgaagagatcgacatcgacgaagttgaagccgtccttaagcggatccaacggtttgatccggtcggtgtggcggcaaaagatctgcgtgactgtctgctgatccaactctcccaattcgataagaccacgccgtggctggaagaggccagactgatcattagcgatcatctcgatctgttagccaatcacgacttccgcactttaatgcgcgtcacgcgtctgaaagaagatgtgctgaaagaagccgtcaatctgatccagagcctcgatccgcgccccgggcagagcatccagactggcgaacctgagtatgtcattccagatgtgctggtgcgtaagcataacggtcactggacggtagaactcaacagtgacagcattccgcgtctgcaaatcaaccagcactacgccagcatgtgcaataacgcgcgcaacgatggtgacagccagtttatccgcagcaatctgcaggatgccaaatggttgatcaagagtctggaaagccgtaacgatacgctactgcgcgtgagtcgctgtatcgttgaacagcagcaagccttctttgagcaaggtgaagaatatatgaaaccgatggtactggccgatatcgcccaggctgtcgaaatgcatgaaagcacgatatctcgcgtgaccacgcaaaaatacctgcatagtccacgaggcatttttgaactgaagtatttcttttccagtcacgtcaataccgagggcggcggcgaagcttcctccacggcgattcgtgcgctggtgaagaaattaatcgcggcggaaaacccagcgaaaccgttgagcgacagcaagttaacctctttgctgagcgaacaaggtatcatggtggcacgccgcactgttgcgaagtaccgagagtctttatccattccgccgagtaaccagcgtaaacaactcgtttgacccaaccgataaggaagacactatgcagctcaacattaccggaaataacgtcgagatcaccgaggcactgcgcgaatttgttacagccaaatttgccaaacttgagcaatattttgaccgaatcaaccaggtctatgttgttctgaaagtggagaaagtcacccacaccagtgatgcaacactgcatgtaaacggtggtgaaattcatgccagcgcggaaggtcaggacatgtacgctgccattgatggcttaattgataagctggcacgccagttgaccaaacataaagataaactgaaacaacactaattgtccgggcaattagcatgtgcatggcggtctgttgtgcggcacaacgggccatttgtacggttaatgctccgagcctgttccactgtttgagtgggcaggttcttaggtgaaattatgacaaataatgatacaactctacagcttagcagtgttcttaacagggaatgtacgcgaagccgcgtccactgtcagagcaaaaaacgcgccctggaaatcatcagcgagctggcggcgaaacaacttagcctgccgcctcaggtggtttttgaagctatcctgacgcgggaaaaaatgggcagtaccggtatcggcaatggtattgccattccgcatggcaaactggaagaagatactctgcgcgccgttggcgttttcgttcagctcgaaacgcctatagctttcgatgccatcgacaaccaaccggtggacttactttttgccctgctggtgccggcagaccaaactaaaacgcacctgcatactctgagcctggtggcgaaacgtctggcggacaaaaccatctgccgccgtttacgcgcagcccagagcgatgaagagctgtatcaaatcattacggataccgaaggtactccggatgaagcgtaattattcggtaatgtctcttttagacgttgtgaggagaaacagtacatggtactgatgatcgtcagcggacgtagtggtagtggtaaatctgtcgccctgcgtgcgctggaagatatgggtttttactgcgtggataaccttcccgtagtgttgttacccgatctggctcgaaccctggccgatcgcgagatttctgccgccgtcagcattgatgttcgtaatatgccggagagtccagaaatattcgaacaggcgatgagtaacctgcctgacgctttcagtccgcaactcctgttcctggatgccgaccgtaataccttaattcgtcgttacagtgacacgcgccgactgcatccgctttccagcaaaaacctgagcctggaaagtgctatcgacaaagaaagcgatttgctggagcctctgcgtagccgagcggatctgattgtcgataccagtgaaatgtccgttcacgagctggctgaaatgctgcgtacccgtctgctgggtaaacgtgaacgcgaactgaccatggtctttgagtctttcggcttcaaacacggtatccctatcgatgcagattacgtctttgacgtgcgcttcttgccgaacccgcactgggatccgaaactgcgtccaatgacaggtcttgataaacctgtcgccgcgttcctcgaccgccacacagaagtacacaattttatctaccagacgcgaagctatcttgagctatggttacctatgctggaaaccaacaaccgtagctacttgacggtcgccattggttgtaccggcgggaagcaccgtagcgtgtatattgcagagcaactggcagactacttccgcagccgcggtaaaaacgtccagagtcgccatcgtacgctggaaaaacgtaaaccatgaccgtcaagcaaactgttgaaatcacaaacaagctgggcatgcatgcccggcctgcaatgaagctgtttgaattaatgcagggttttgacgctgaagtgctcttacgtaatgacgaaggcaccgaggctgaagccaacagcgttattgcgctgctgatgttggattctgccaaaggacggcagattgaagttgaagcgaccggtccacaggaagaggaagcactggccgccgttatcgccctctttaattctggttttgatgaagattaatcttcatcactttgacatacaactcccttcaaactccccccgacaataagaaaatcacgtactgaaatcgttctcaatcaacgtcatttgtacattttgtgcgcttttcactttcagaagaaccttaagaaaaccttaagaggcattgtttaggttttgtttaagttaatcgaccatactggagatcgtcagaaaatatttccaggagatggcatgattcgcttatctgaacaaagtcccctgggcaccggaagacatcggaaatgttatgcgcatccggaagatgcccaacgctgtatcaagattgtctaccatcgtggcgatggtggcgataaagagatccgccgtgagttaaagtactacgcgcatcttggtcgccggttaaaagactggagtggaataccgcgctatcacggtaccgttgagacggattgcggaaccggttatgtctacgatgtgattgcagattttgacggcaagccttccattacgctgaccgaatttgctgaacaatgccgttacgaagaagacattgcacaactgcgccagctactgaaacagctgaagcgttatttgcaggataaccgtatcgtgacgatgagcctgaagccgcagaatatcctctgtcaccgcatcagtgagagtgaggttatcccggtcgtctgcgacaacattggtgaaagcacattgattccactggcgacctggagcaagtggtgttgtctgcgtaagcaagagcggttatggaaacgatttatcgcccaaccggcgctggctattgccctgcagaaagatctgcaacctcgtgagagcaaaacgctggccctcactagccgcgaagcttaatccagctggtgttgttgcataaacggctcaccgcctaactgatacatctgccgtaaaatccacgcctgacggctacgcacgtagccgcttgggctggagactttgaaacgaagtggattaggtaatacagctgccagtaatgcagcttcgctccgggtaagtttgctcgcgggtttgtggaaataacgttgtgccgcagcttcgacgccaaacacaccgtcgccaaattcggcgatattcaggtaaaccgtcaggatacgctttttgctccagaccgtttctatccccagcgttaatccggcttccagcccttttcgaacccagctacgcccatcccataaaaagagatttttggctgtctgttgagaaatcgtactagcaccgcgaatacggttttcattgcgctcgttgtgcgccagggctttctcaatggaagcgacatcaaagccccagtgctcaggaaatttctgatcttctgcggcaatcaccgccagtcccatccacgggctgatttgatccatactgacccagtcagaatgtgccacgtaacgaaaattgccatgcagccaggcgctgacctgtcgctcgaccattaccgcactgaagggaacaggcgcaacgctaaacaacgcgatgcccccgccccagaaaacggcgaggacaaccattaaccgcaaaagaaaacggcgaacgaaactaaacaccgttaagcggcttttactcattcagccagaaccagcacgcgggaaaccagcttatcaatgccgctcgccgcttctgcaatgttctgcgccagcatatatgctggggtggtgacaatcttattgtcttcatcaaccacgatatcatcgacaggacacggcacatgctccgcgcccatctcttccagcacttctgcggtatcgatatcagtaccgatggtcaaacgcagcgggaaatcgaaaattttcggcagcatcgccggggcaatacacataaaaccaagcggttttccggcctgatgcatcgcttgtgccagcgcctttaattcacggtcaacggtgcattcgctaccaagactggcaaaattgcttaaattcttcgccgcgccaaacccccccggcacaatcaacgcatccagttcagcggcatcggcctgggccagaggacggatttcaccgcgcgttattcgtgccgcttcaatcagcacattgcgcgtttccgtcatcgcttcgccagttaaatggttgataacatcaacctgctgcttatccggtgcaaagcagaccgcctgcgcaccgctgcgactaatagctaacaacgtcaacaccgcttcatgaatttcagaaccgtcatagacgccgcatccgctcagaattacgccaattttcttcattgtgatcatcctttcgcaattgactgaaacacattaatttttttaataaaaatggtacgcatcacacatttaactgattcatgtaacaaatcatttaagttttgctatcttaactgcgtgcggcctgaaaaacagtgctgtgcccttgtaactcatcataataatttacggcgcagccaagatttccctggtgttggcgcagtattcgcgcaccccggtctagccggggtcattttttagtggcttttgccacccacgctttcagcacttctacgtcgtgacgccactcttctttcatctcttcaatccattcaccgacgttatcttcccaggccggaaggtcaggagactgaatttgctgacccagctgttgcagatggcgtaaccccacactccccgccgcacctttaattttatgtccttcctcaacaatgccttttttatcctgcgccgtcagattgctctccagcacgctgacatagcccggcatcatcttctcaaacaccgctaacccgtcggtgatcagcttcggtcctacaagttcgagatactgttccagcatgggaatatcgagcaatgcttcacttttactgttctcttctgtcgtcaccgtactctcctcatcatcctgggtatcccagaatttcttgatcatcgcggttagcgccggaacagaaagcggcttactcagcacatcatccattccagcattgaggtactcttgtttgtctttcagcacgttagcggttaaggccaccagcggcggtaaatcctcgcgcggataacgtttcgtcagttcacgagagatatccagcccggtcatatctggcaactgaatatccagcaacaccaggtcgtattcgcccggtttaaacatctccagcgccgccttgccggtcatggcgacatcaacgctgttacctaatttttccagcacagaacgcgcaacaatcacgttcagttcaatgtcttccaccagcagcacattcagcgccggtaaaggcatatcgtcttcatcaaacgcatcatcgacctcttctgctacgctcggtgcgtggatcgtcaacgtaaaggtactacctttgccctgttcgctggtaaccgtaatatcgccgcccatatttttcgccagacgacgagaaacggccagaccaataccggtgccggtggcaggtttaccgccatgactgtctttcacctggtaatacatggcgaaaattttatccagctcatcctgcggaatgccgataccagagtcttccacttcaaaatgcagcatatcgccttcatcgtagcgcacgcgcacggtaacctggccttgctgggtgaatttgacggcgttactgatgaggttccacaggatctgccgtaaacgcgtcccgtcggtaatgacctgatgcggtaatggcagcgtcggctccaggttaaagcgcaatcctttttgttgcgcctgcaatgcggagagattttccagatcggcaaggaagctggtgaaatcaaccggttgattatcaagctggaccttgcgccgttccatcttatccatgtcgataatatcgttaaagatattccccagcgtgacggcgctaacatggatggtcttgagatatttttcctgctcggcggtgagttcggtatccagcagaatgcggctcagaccgacgataccgttcagcggtgtacgcaattcgtgactgatggtggagataaacgtcgttttgtcgcggctggcccgttcaagcgcatcctgataccgcttacgctcggtaatgtcgcgaccaaagcccatcaaaccgtgacgtttacccacgcggtcgtagtacggcactttacggatttcaaagcaggctttgcgcccgtccgggtaatccagccactgttcataggtcagactcacattatgacggaacactttttcatcggtttcaatgacttttgcggcggcttccggactgtaaacatcagcaggtttcaggtgaaccagttgtttttcgctttttccggtcagcagctccatcgcgcggttacagccggaaaactctttatcttcgttacgataaaaaaccaggtcgggactagcatcaaggaaggaacgtaagaaactggattgctgctcgagctgaatttgtgtctcttcgcgctctttgatttcaattttcagttggccgaaggtttcctgcagttctgcttccgctttttcacgaacggcaatttcctgatttagctgggcaatattatcttttaactgaacgttgaggctcaaatcgcgctcgcgcatctcctccagtttttgcaccagccgactcagacgttgtcgactctcctccagttgctcgacgaccacgcttagaaagtagaccgcccacggcgtaatcagcaaaccaaagaagatagaacgaataacatcaatgctttcgacctgaccatgcagcaccatggttaccgccatttgtaccacaatggcaagaacgacgagggccagcgccagcaacatactgaagcgcaccagacctaacttcatcatcaggtcaacataatactgcgccagcagacgaatttgcttcattagggaattccttcacgacaacctgccccaataatacccaattctgacagttacgttataaattgtgtgagaaatgcggaattcccctcaacgacttactccgttggaggtagccacggacgtcccagcgcgcttccctgtacgccatgttcattcagatagcgatccagctcgaccattcccgtccatcgattttcgcaccacagcggagcaagcagcgtcgggcgacgggcgctggcggaaatgcggtggtagatcacttccggtggcgtatggcgaatcatttctccggcagtgagcgtgtaatcctccagttcaataccgttcaaacgccccgcttcccaggctttcgccataatgctgcctttcacaatatgcagcggatgcagctttatgccgtccacgccggtttcaaccactcgctccagcgtttgcaaacattcagcctgcccttcgccaggcaggccgacaattaagtgggaacacaccttcagcccgcgctgacgtgccagctgggttgtacgctgataacaggcaaaatcatggccgcggttgatgcgatgcagtgttttgtcgtgggcggtttgtagccccagctccagccacacttcgtaaccctggtccttatattcgcaaagcagatccagcaccgcatccggcacgcagtccgggcgggtacccacacacaaaccgacaatattggcctggctcaccgcctgctgatacatagaacgcagcacctgaacttccgcaaaggtgctggtatacgcctgaaagtaggccagatagcgtttagcgcggttaactaaattcgcctggtgcgccagttgctcggcaatggaacgatgctgctgcgcttcatcggcaaagctggcaacattacagaatgtgcagccaccacgcccgatggtaccgtcacggttagggcagctaaaaccgccgtgcagcgtcagcttatgcaccttttgcccataacgacgggtgagatcaccaccaaacatattgactaatttctgtaactgcataatctgatagaccgcgccttgaaaagaggccaaagcctgccatttttagctcaattcggcgatgacctggatcaatcgtcccggcctgcttttatcaactgcataatcaatcaaaattaccgaaatttcatgcataatcacataaatcacttttgcttatcttgtgtcagatttttttatctcctgatggattttaggcaaaaacagtagcatgaaacgtcattaccaattaaggcagtataaaatgctggttttgtcgtcagttcaaggcaggataagggttaacacacctttatgacagtcaggaattgactgtttctctaacgacttcccttttagccttaaagataaaatccattttaatttcagtcatttaataaagaattttgcgctaaagcacatttctgtaccaataagcttgccatttgacctgtatcagctttcccgataagttggaaatccgctggaagctttctggatgagcagcctgctcatcatatttatgcagtaattgagatcccctcttcaccgtattaaccgatgcgaaaaggacaacaagggggcgaatgcgaggcgcgcgtatgacacgcaaaccccgtcgccacgctctttctgtgcccgtgcgcagcggtagcgaagtggggttcccgcagagcctgggggaggttcacgatatgttgtacgataaatcccttgagagggataactgtggtttcggcctgatcgcccacatagaaggcgaacctagccacaaggtagtgcgtactgcaatacacgcactggcccgcatgcagcaccgtggcgcgattctcgccgatggtaaaaccggcgacggttgcggcttgctgttacaaaaaccggatcgcttttttcgcatcgttgcgcaggagcgcggctggcgtttagcaaaaaactacgctgtcgggatgctcttcctgaataaagatcctgaactcgccgctgccgcacgccgcatcgttgaagaagaactgcaacgcgaaaccttgagcattgtgggctggcgtgatgtccccactaacgaaggcgtgctgggtgaaatcgccctctcctctctgccacgcattgagcaaatttttgtgaacgccccggcaggctggcgtccacgcgatatggagcgccgtctgtttatcgcccgccgccgcattgaaaagcgtctcgaagccgacaaagacttctacgtctgtagcctgagcaatctggtgaacatctataaaggtctgtgtatgccgacggatctgccgcgcttttatctggatcttgcggacctgcgtctggaaagcgccatttgcctgttccaccagcgcttctccactaacaccgtaccgcgctggccgctggcgcaaccgttccgctatctggcgcataacggtgaaatcaacaccatcaccggtaaccgccaatgggcgcgtgcgcgtacttataaattccagacaccgcttatccctgacctgcacgacgccgcaccgttcgtcaacgaaaccggctctgactccagtagcatggataacatgctggaactgctgctggcaggcgggatggatatcatccgcgccatgcgtctattagtaccacccgcctggcagaacaacccggatatggacccggaactgcgtgccttctttgactttaactccatgcatatggagccgtgggatggcccggcgggcatcgtgatgtccgacggtcgttttgccgcctgtaacctcgaccgtaacggtctgcgtccggcgcgctacgtcatcaccaaagataagctcatcacctgcgcctctgaagtcggtatctgggattaccagcctgacgaagtggtcgaaaaaggccgcgtcgggccaggcgaactgatggttatcgacacccgcagtgggcgtattctgcacagcgcagaaaccgatgacgatctgaaaagccgccatccatataaagagtggatggagaaaaacgtccgccgactggtaccgtttgaagatctgcccgatgaagaagtgggtagccgcgaactggacgacgacacgcttgccagctaccagaaacagtttaactacagcgcggaagagctggactccgtaattcgcgtactgggcgaaaacggtcaggaagcggtcggtagcatgggcgatgataccccattcgccgtgctctccagtcagccgcgcattatttacgactacttccgccagcagtttgcccaggtgactaacccgccaatcgacccgctgcgtgaagcgcatgttatgagcctcgccaccagtatcggtcgtgaaatgaacgtcttttgcgaagcagagggccaggcgcaccgtttaagctttaaaagcccgattctgctctactccgatttcaaacagctcacgacgatgaaagaggagcactaccgcgcagatacgctggatatcacctttgacgtcactaaaaccacgctcgaagcgacagtcaaagagctgtgcgacaaagccgaaaaaatggtacgtagcggcaccgtgctgctggtgctctccgaccggaatatcgctaaagatcgcctgccggttccagccccgatggcggttggcgcgatccagacccgtctggtcgatcaaagcctgcgttgcgatgccaacatcatcgtcgaaaccgccagcgcccgcgatccgcaccacttcgccgtgttgctgggcttcggcgcgacggctatttatccataccttgcctatgaaacgctgggccgcctggtagacacccatgcgattgccaaagattatcgtaccgtgatgctcaactaccgtaacggcatcaacaaaggcttgtacaaaatcatgtccaaaatgggcatctccaccatcgcctcttaccgctgcagcaaactgtttgaagcggtcggtctacacgatgatgtagtgggcctgtgcttccagggggcggtcagccgcattggtggagcaagctttgaagacttccagcaggatctgctgaatctgagcaaacgtgcctggctggcgcgtaagcccatcagccagggcggtctgctgaaatacgtccacggcggcgaataccacgcctacaacccggacgtggtgcgcacgctgcaacaagcggtacaaagcggcgagtacagcgactatcaggaatacgcgaagctggttaatgagcgtccggcaaccacgctgcgcgatctgctggcaattacgccgggtgaaaacgcggtcaacattgctgatgttgaaccggcaagcgaactgtttaaacgctttgataccgccgcgatgtctatcggcgcgttaagcccggaagcccacgaggcgctggcggaagcgatgaacagcatcggcggtaatagcaactccggtgaaggcggcgaagacccggcgcgctacggcaccaacaaagtgagccgcatcaagcaggtggcttccggtcgctttggggttactccggcgtatctggtcaatgccgacgtcattcagattaaagtcgcccagggcgcgaagccaggcgaaggcggtcagttgccgggtgataaagtcacgccttacatcgccaaactgcgctatagcgtgcccggagtgacgctgatctccccgccgccgcaccacgatatctactctatcgaggacttagcgcagctcattttcgacctcaagcaggttaacccgaaagcgatgatctccgtgaagctggtttccgaaccgggagtaggcaccatcgcgactggcgtggcaaaagcttatgcggacttgatcaccatcgcaggctatgacggcggcaccggcgcaagtccgcttagtagcgtgaaatacgcaggctgtccgtgggagctggggcttgttgaaacccagcaggcgctggttgctaacggcttgcgtcacaagatccgtttgcaggtcgatggcggcctgaaaacgggtgtcgatatcatcaaggcggcgattctcggcgcagaaagcttcggcttcggcactggcccgatggtggcgctcggctgtaaatatctacgtatttgccatctgaacaactgcgcaacgggtgtagcaactcaggatgacaaactgcgtaagaaccactatcacggcctgccattcaaggtgacgaattactttgagtttatcgcccgtgaaacccgcgagctgatggcacagcttggcgtaacacgtctggtggatctgattggtcgcaccgacctgctgaaagagctggacggtttcaccgccaaacagcagaagctggcgctgagcaagctgctggagactgccgaaccgcatccaggtaaggcactctactgcaccgaaaacaacccgccgtttgataacggcctgctgaacgcgcagttgctgcaacaggcgaaaccgtttgtcgatgagcgccagagcaaaaccttctggttcgatattcgcaacaccgaccgttctgtcggcgcgagccttagtggctatatcgcccagacgcacggcgatcaggggctggcagccgatcctatcaaagcgtacttcaacggcaccgcaggccagagcttcggcgtgtggaacgcgggcggcgtggaactgtacctgaccggtgatgccaacgactatgtcggtaaaggcatggcgggcggcttaatcgccattcgtcctccggttggttccgccttccgcagccatgaagcaagcattatcggcaacacctgcctgtatggcgcgaccggtggtcgtctgtatgccgcaggccgcgcgggtgaacgtttcggcgtgcgtaactccggtgctatcaccgtggtagaaggcattggcgacaacggttgtgaatatatgacgggtggtatcgtctgcattctgggtaaaaccggcgttaacttcggtgcgggcatgaccggcggtttcgcttacgttctcgatgaaagcggcgatttccgcaaacgcgttaacccggaactggtcgaggtcttaagcgttgacgctctggcgatccatgaagagcatctgcgtggtcttatcaccgagcatgtgcagcataccggctctcagcgcggtgaagagattctggcgaactggagtaccttcgccactaaatttgcgctggttaaaccgaagtccagtgatgtaaaagcactgctgggtcaccgtagtcgtagcgcagctgagttgcgcgtgcaggcgcagtaaggggtagcaacaatgagtcagaatgtttatcaatttatcgacctgcagcgcgttgatccgccaaagaaaccgctgaagatccgcaaaattgagtttgttgaaatttacgagccgttttccgaaggccaggccaaagcgcaggctgaccgctgcctgagctgcggcaacccatactgcgagtggaaatgcccggtacacaactacatcccgaactggctgaagctcgccaacgaggggcgtatttttgaagcggcggaactgagccaccagaccaacaccctgccggaagtttgcggacgagtctgcccgcaagaccgtctgtgcgaaggttcctgcactctgaacgatgagtttggcgcggtgaccatcggcaacattgagcgctatatcaacgataaagcgttcgagatgggctggcgtccggatatgtctggtgtgaaacagaccggtaaaaaagtggcgattatcggcgcaggcccggcaggtctggcgtgtgcggatgtcctgacgcgtaacggcgtaaaagccgttgtcttcgaccgtcatccagaaattggcgggctgctgaccttcggtattccggccttcaagctggaaaaagaggtaatgacgcgtcgccgtgaaatcttcaccggcatgggtattgaattcaaactcaataccgaagtgggccgcgacgtacagctggacgatctgctgagtgattacgatgccgtgttccttggcgtcgggacttatcagagtatgcgcggcgggctggaaaacgaagacgccgatggcgtgtacgcagcgctgccgttcctcatcgccaacaccaaacagttaatgggctttggtgaaacccgcgacgaaccgttcgtcagcatggaaggcaaacgcgtggtggtccttggcggtggcgacactgcgatggactgcgtgcgtacgtccgtgcgccagggagcgaagcacgttacctgtgcctatcgtcgtgatgaagagaacatgccgggttcccgccgcgaagtgaaaaacgcgcgggaagaaggcgtagagttcaaattcaacgtccagccgctgggtattgaagtgaacggtaacggcaaagtcagcggcgtaaaaatggtgcgtaccgaaatgggcgaaccggacgccaaaggccgtcgccgcgcggagatcgttgcaggttccgaacatatcgttccggcagatgcggtgatcatggcgtttggtttccgtccacacaacatggaatggctggcaaaacacagcgtcgagctggatagtcaaggccgcatcatcgccccggaaggcagcgacaacgccttccagaccagcaacccgaaaatctttgctggcggcgatatcgtccgtggttccgatctggtggtgaccgctattgccgaaggtcgtaaggcggcagacggtattatgaactggctggaagtttaagcgaggtaacaatgaattcgccagactgtgtctggcgaatcaaattactgacgaagtgcgcgttgttttctggcaaatgcggcatgagcgtttgacctttcctataatagggataattttcaataaattgtgctttgttcaccaagtctgatgagtgaagcacatcaagcaatttctcatttacaatccgtctcaattacttgttaacacctctgacaataccgattctgcaagctattcagtcttttcattccatgtaaattgtctcgatattaatatacaaaatatgaatataaaaaaccaatatattatccttaattatctatatattttcctatttttcagcgcaaacattcatgtaatgaataattatcaccacaaaccacctcaccagcaccttattattcacatgatcgtaactataaaattcattaaataaatacatcccagcaagttggctatttctgaacgagttatttatttacattcacaaacagatatatatactgcttcagctttttattttaaaaaataaatttgttattaaggatatgttcatatgtttttcaaaaagaacctcacaacagctgctatttgtgcagcactttctgttgcagcattcagtgccatggcaacagatagtactgatacagaattaactatcatcggcgagtatacccctggtgcatgtaccccagttgttacgggcggcggcattgttgactatgggaaacatcataacagtgcgctgaatccgaccggtaaaagtaataaactggttcaactgggccgcaaaaacagcacattaaatataacctgcacagcaccaacgctaattgctgtaacctccaaggataaccgtcagagcaccattgtagcgttaaacgacacatcctatattgaaaaagcttatgatactctcgtagatatgaagggaacgaaaaacgcctttggtttaggttctgcgcctaatggacaaaaaattggcgctgcatccattggtattgacaggtctaatggtgggattcacgcggcggacgatacaggtgaaattcctgtcgacctgattcaaactgaccactggagtgcagcgacccccacatggaaagccagttctaatggcgcattctgcagcctgacaagttgcagtgcaatcgagcgcggttattctgttgcaaaaacaggggaactgacacctgttgctattacagcggtcaccttcccgttactgattgatgctgcggtaaatgacaatactattcttggttctgatgaaacgatcaaactggatggtaacgtcactatcagcgttcagtatttataagaacttgtaatacagtttttatttttacgcattaaccagttagctataactcggacagattatgccctatgacatggtctgtcttaatcaatctcatcgcaaacagtgcataacatatattaacaatatgtttctgcgttatttatcattattacaggagttttaatttaaatgctcagacacattacattcactgtatttataacaacatcaatgaatactaacaatgccggacaggagtactatcaggcattcgttttatacgatcggttaatgtttcaggaaagctcttcgcatatcttggggaaagtaaatgtaatacgctgttcttaattgttcagtgctcaccccccagagtatagctcattccattattcaacttagctccatataaagggacagataatggaaagcctcagtgaaggaaccacagcaggctaccagcaaatccacgacggtattattcatctggtcgatagcgcccggacggaaacggtacgtagcgttaacgcgttaatgaccgcgacgtaccaggaaattggccgacgaattgtcgaatttgaacaaggtggcgaggccagggctgcgtatggtgcgcagctaatcaagcgactaagtaaggatttatgtctaaggtataagcgtgggttctctgcaaaaaacttacgccaaatgaggcttttttacctcttttttcaacatgttgaaattcaccagacaatgtctggcgaattaacaccattgggaattccgcagacaccgtctgcagaattcccaagcgcaaagatttggcagacgctgtctgccaaatctttccccttgcccaggtccacctacgtccgtttactttccgttaaaaacgctgacgcccgcagcttttatgaaaaagagacgctccgctgtggctggtctgttcgccagctagagcggcaaattgcgacccagttttatgagcggacactactgagtcatgacaaaagtgccatgctgcaacaacacgctcctgccgagacgcatattcttccgcaacaggcgatacgcgatccctttgtgctcgaatttctggaattgaaagatgaatatagtgaatccgattttgaggaggcgctgatcaaccacctgatggatttcatgctggaacttggggatgattttgcctttgttggtcggcagcgaaggttacgcattgatgacaactggtttcgtgtcgatctgctgtttttccaccgccgtttacgctgcctgctaatcgtcgatctaaaagtgggcaaattcagctatagcgatgccggacagatgaatatgtatctcaactacgccaaagagcactggacgctaccggatgaaaatccgcccatcggtctggttctctgtgcagagaaaggagccggagaagcgcattatgctctggcaggtttgcctaacaccgttctggcaagcgaatataagatgcaactacctgatgagaaacgactcgcagatgaactcgttcgaacacaggcggtgctagaggaaggctatagacgccgttaatttcagcggtttcgaattctgcagacagtgtctgcagaatctttaaaacgaactaagttttaagccattaaatcagccttaaccttcaccacaacctttttaatctctccaggctcgccgacaacgcatcctggtttatgcggttcacctggcataaacacggcgaacattcccggttttaagatgatggcttgctcgttatcaatggtgctgcaaagctgataatcatcctcatggtggaactcttcacactgacgcgcagtgcctgccatgccaaacagaatccgttcctcaccgtttaataacagctggatatcaatgtattgctcgtgcaattccgcttttttctcgacggggctttgagtgttaaacgtcatgacattcataaagatattgtcgccctgtaattcgtaacgacccggcgctttttcttgcggtctggcagctaatgccagcgttaacgcgtcctgtaacgcaggatgtaacccagcagacggtaaactctgtacttcacccatcatcataatttttctccctgggccaacagcgcagccccaagtaaacctgcatcatggcggtaatgcgccgccagtaaatcaacatgaaatgccgctggctcctgcgccagatacgtttccaccagcgccagatacccttctgccagaccaacgctgccaccgaccaccacgcactggcaatcagttgtggctttaatatcagcgatcagccttgcaagcgtacgtgcggagcggtgaatcagctgctgcgcctgctcgtcaccctgcccggcgcgcgtgaaaatagttttcgcatccgcgccagccaactccccctgcgctgccgctgcaatgccgcgaccagaagcaatcgcttccacgcaacctgtgcgtccacagccgcagactgggccgtgtggatcggcaagcgtatgcccgatatgccccgccagaccgccagggccggtaagcagtttgcagccgctcactacaccgccgccaacgccggtggaaacggtgataaagaccatatcggttatatcgccatccagcgcctgaaactccgcccatgctgcggcctgcgcgtcgttaatggcaatggtcggcaaattggtaagttgttccagcgttttgactaacggaaagtgtagcaatccaccaagattatgcggattaagcgccagcaagctgccgtcacggattatcccggtgctagcgatggcaacccgctgcgcatgagcttgcaacggagagactaatgcggataaggcatcacgcaaggcttctggtgtctggctggctggcgtaggaagttcacgacgatcgcggatctgcccgtcagcgccaatcagcgcggcggcaagtttagtaccgccgatatcaatcgccagtgtggtcatagcaccgcctttttcatcgctgtgttgtaccactgacaaatgtgctcaagacgcgtgattgcagaaccgaccgtcaccgcccacgcgccgtggcgcatcgcatccgccgcctgagcaggcgtgttgtaacgcccttcggcaatcacccgacatccggcgtcgctcaacgttttcaccagcgccagatccggctcttctggcgtttcaggcgtggtatagccagaaagcgtagtgccaataatttcggctcccagcttttggcatgccaggccgtcttccggcgtactgcagtcggtcatcgccagtaaaccgtgatggtgaatacgtgccagcagcgtttcaacaggcaccggacgcgggcggtcggtgccgtcaatggcgataatgtccgcgcccgcctgcgccagcgcatcaacatcttcaatataggccgtgatgcgtaccggagaatcctccagatcgcgtttcacaattccaataatcggcacgctcaccaccgcacgcgtggcttgcagatttgccacaccttcaatgcgaatggcaaccgcgcccgcctgttctgccgctaatgccatggcggcgacgatttcgggtttatcgagcgggctgtccggaaccggctggcaggagacaatcaggccaccgttagcagcgattttttgatccagttgtgcaagtaagctcatacatcttcccttagcgaaaggcccggtacatagaccgggcaacaggattaacttttggttttgactaaatcgtttttggcgctgccaaacggcacggcaccgctgaatggtttaccgtcgatagcgtcatgagtacgcaacgcttccgggcgcaaccaacgctgaacgcgagaaggcatatccagcccaatcagcaggatcaccacgaacgtcagactgaagctgaggcttgccagcgcagtacccagatccagacgttgagcgatcaacgcgccgatgattggggccagtgcaccgcccaatgcgccaacgttgtaggtaaagcccaggcccgctgcacgctggtcggtatcgaaataaccgccaatcagttttggtaagatcccggcgatcccttgtccaagcatttgctggaagaacagtaacagaccgagcacccagacgtttgcgccgccaatcgcaaataccggaataatcagcagctggctggccagcaggctacaaacgtacgctttgcgggttcccagccagtcaccgaggaagccacctacgcagcatcccaccgccgcgccaaagccactaaagaacagcacattggctacagtatgcgggttataagccagatcggttttcagatacgttggcagcagcgcctgaatcggccaactgtagaggaaagcaaacaacacgaccaccatcagcattacgcccgttggccagcgtttgcctgcactctgcaccataaagctgataaagattgcggcgcataacagcccaagaacagcgacgatcgcggcattttgcaggttaccggcgaagcagaaccacagcgcagtagccgccgccagtgtcattacgatattggcaatgcgatgttcaccacggtagagaatatccaccattgtgcgtactggtgctttacctgcgtgtttctctttccagtcttccgcttccgggatgtttttacgcagccagagagcaaagatgattggcaaaatgccgataaagaacagcgcacgccagccccagaccggaaccaccaggctatagacctgagcggcaacgacggcccccacagagaagccactaatcaaaaaaccactggctttgttacgcagatgttttggccagctttcaatgacataggtggcgctggaaccgtattcacccgccatccccatgccgatgaccagacgagcgataaacatggtgatgtagcctggcgcaaagccgcaggccagcgtcccggcgctgaagagaacgatgctggtgaccattgccagacgacgcccgtagcggtcacccatagcgccgagcatcaggccgccgaaccagcgagagataaaggctgcagagatcagacttgccgcctgcaccgtcgtcagcccgaattcaccttgtacttcggtgagtaccagggcgattaaaacgaaatcaaaaccgtcaagcagatatcccaaccaggcagcggaaaatgcgcgccattgtgcacggttgagatggcgataccacgggatattctgggttgtagtactcattgtgagtctcccgcggtgggcgatgcccacacgctttggtatgaaaattgtagggtacagatgcgtttatttcccctcacccggtaggggcgagcgaggggaaacaactcacccgcgctcttgcatcaactgctgggccagcgccttcagttctggcagatatttttcatctaccggtccaaacggtttgcggcacagcggcacagaaacgacatccatataatggaggacagttttcaggccgcggaatacgcccgttttgatcagtaaatcaatgactttattgcattcagtttgcagtttctgcgcggtctggatatcgccttctttcagcgccttaacgatcccctgatagcgccagcccatgatgttgtaggtactgccgataccaccatcagcgcccgccagcagaccagaggcgaagatttcgtcgtaaccgttatagagcacaagatcaggatgttcacgacggatctgctccatctgatagagatcgccagaggtctgtttcagcgcacctacgccaggcaatgtaacaagtgtgttgatctgatccagggtcagttttaccccactcagggctggaatgttgtacaccaccatcggcaaaccatccgcgctatcaataattgcccgatagtgatcgcagtgttcttcaaagctgaaaggatagtagaacggcgtgacggcggagacggcatcgaagccataacgtttagcgcttgccgcaagttgttggctttcggcggtgctgacgcaaccgacgtgggcgatgagtttaatcttacctttcgcctcttcggcgacgatttccagtacctgttcacgctcggaaaggctttgtacaaaggcctcgccggtgctaccacccacgtataaaccgtcgatgccctgctgaatattgaactgaaccaggcgacgcagactcgctttatccagtgcttgttgttggtcaaaaggagtcaggagtgcagccattacgccacgtaaattcgttgccataaatacctctgaagtgatgcttgtctgataaacgatatacctttatacctgttataccagatcaattaagcaacaccccatacagaaagcttataatgcgatctgcttcactaaagtggcattatttctttttgttggtggtctgaccgaaagcgtgccaggtagcagagacgctgttgagatggctttgcaacgcacgatcggcttcgtcaggatcatgacggcggatcgcatcaacgatcgcaatatgctgttgataactaacgttgttatgttcgtgcagtgcctgatcggtaaccgttgggcgtgcggcaataagccagtcgagcagggcaacgtggatcgccatgaagattgggttaccggggatctccgccagcacgcggtggaaatcaacgtcactacgaatgaatgccgcgttgttatccaggctctgactgttgatttccagtgcttttgccagcaaatcgatttgctcatcggtggcatgttcagccgcatagcgcaccagactggattcaaagaacagacgtaattgttcgaaatgggcaatcccaccgggatgagaaaggaaatctttcgccatgccggaaagctcaccgatgatagtgtccgcagaaggacggctgacgcgagcgcgttcgccgttgtttatttgcaccagacctttgcgttttaacgctgccagcgcttcacgcacgctaggacgcccgacgttaaagaacgccatcagttcgcgttcagacggtaattgttcaccttcgccaaattcacgacggcggatcatctgttccagctcttcttccaccatttcggagagttttttacgcgccagcgggcggctacgcaagttgcgaccaattgcaggactagaatcttcggtttggctatcaaatgcgttcataaggcccattctgtaaggtcagtgtgattaacatcatcagtgacatcctatcacaggattgaaagtaggggaaaatggcagggttttctctttgtgcctcatcattaccataattaacggaataattaactattgcgaaaaattaatgtaacgcagataaaaacatcccgtttgaattatttataagactattcacgagcattatgaatattatgaatgtgttcttacaaaataatcataagcgcatattttttaatgaaaaatcacctcacctacaattaaaaacacgacatccgcaccataaatagccttgcaaaaaatataacatcgttgttttcaatctgccgtttatgggattgaccgttttcttttgacacggagttcaacaatgttcggcataattatatctgtcatcgtattaattacgatgggctatttgatcctgaaaaactacaaacctcaggtggtgctggctgccgcaggtatcttcctgatgatgtgcggtgtctggttagggttcggtggtgtactcgatcccaccaaaagcagcggctacttgatcgtcgatatttataatgaaatcctgcgcatgctgtccaaccgcattgccggattggggctgagcattatggcggtgggcggttatgcccgctacatggagcgcataggggccagtcgcgcgatggtgagcttgttaagccgcccgttaaaactcattcgcagcccgtatattattctgagcgcaacttacgtcatcggccaaatcatggcgcagtttattaccagcgcctccggtctgggtatgttgctgatggtcaccttatttccgacgctggtgagtctgggagtaagtcgtctctctgcggtggcagttatcgcaaccacgatgtccattgagtgggggattctggaaacgaactccatttttgctgcccaggtagcgggaatgaaaattgccacatacttcttccactaccagcttccggtcgcctcttgcgtcattatcagcgtggcgatctcccactttttcgtgcaacgcgcttttgacaaaaaagataaaaatatcaatcacgaacaggcagagcaaaaagctctcgataatgtcccgccgctctattacgccattttacctgtgatgccgttaatcctgatgctcggcagcctgttcctcgcccacgtcgggctgatgcagagtgaactgcatctggtggtggtgatgttactgagtttgactgtgacgatgtttgttgagttcttccgcaagcataacttgcgcgaaacaatggacgatgtgcaggcgttttttgacggcatgggtacgcagtttgccaacgtggtaacgctggtggtcgcgggtgaaatatttgcgaaaggcttaacgacgattggcactgtcgatgcggttatcaggggggcggagcattctggtctgggcggtattggcgtgatgattattatggcgctggtcattgccatttgtgccattgtgatgggctctggcaatgcgccgtttatgagttttgccagtcttattccgaatatcgcagccggactacatgtaccagcggttgtaatgattatgccgatgcattttgccacgacgctagcgcgcgcggttagcccgattactgcggtggtggtcgttacgagtggaattgcaggcgttagcccttttgcggtggtgaagcggacagcgatccccatggcagtcggtttcgtggtgaatatgattgccacaatcacgctattttattaagtcattaaaaagacaaaacaggccgcctgggcctgttttgtattacttcacaacgcgtaatgccggtcgaccaccgcgtggtggctgcggaggttcatcgtcaggatgagtgtcatcatcgtgatctggcttgtcgccatcaataacgctcataacggtttcgttgtctgcgcttgcctcttcatcattcatgatgctggtatcttcatcgtaggcagcttcaggctcaaacatcgtgcctgcgccattttcacgggcgtagatagccagcacggcagccagcggcacagaaacctgacgcggaatgccaccaaagcgcgcgttaaagcgcacctcatcattcgccagttccagattgccgacagcacgcggcgcaatgttgagtacgatttgcccgtcacgcgcatattccataggaacctgcacgccagggagcgtcacatccaccaccaggtgcggcgtgagctggttatccagcaaccactcatagaatgcacgcagcagatagggacgacgtggtgttagctgactcaaatccatacagattaactccggcccagacgcatttcacgttctgcttcagttaaagaagcaaggaaagagtcacgctcaaagacgcgggtcatatagcctttcagctctttcgcacccgggccgctgaactcgatgcccagttgcggcagacgccacagcagcggagcaagatagcaatcgaccaggctgaactcatcgctcaggaagtacggcttctgaccgaagaccggcgcaatcgccagcagttcttcgcgcagttgcttacgtgcggcatctgcttcagaagcactaccgttgatgatggtgttcatcagcgtgtaccagtctttttcgatgcgatgcatgtacagacggctttcaccgcgagctaccgggtaaacaggcatcagtggcggatgcgggaaacgctcatccagatattccataatgatgcgagattcccacagggtcagctcacgatccaccagggtcggaacgctctgattcgggttgaggtcaatcagatcctgaggcggattgtccttttccacgtgttcgatctcgaaacttacacctttctcagccagcacaatgcggacctgatggctatagatgtcagtaggaccggaaaacagcgtcattacgctacgtttgttggcagcgacagccatgaaaacctccaggtatagtcagaatttttactgctaccagccaccaggtggccagtcagaagttgtgttacccaataaggaacgactctctttgttcgaaaatcaaacaaaaaatgagcaatacccgacatttgggcagaaaattggatgatagtttaccagattttgcgaccattgtggtgagtcgatgccggaaatggggaaaaagagatgcgctttagtctgaaatagttgacttagtcccttattggcgatgtggtttttgttttacctgtctgtcaggtggcagcaaaaagcaactttccagtttttacgctgattcagattttagctataaaaaaacccgccgaagcgggttttttcgaaaattgttttctgccggagcagaagccaattaacgtttggagaactgcggacgacgacgtgctttacgcagaccgactttcttacgttcaacctgacgagcgtcacgagtaacgaagccagctttacgcagttcagaacgcagggactcgtcgtattccatcagagcgcgggtgataccgtgacggatcgcaccagcctgaccagagataccaccacctttaacggtgatgtacaggtccagtttctcaaccatgtcgaccagttccagcggctgacgaactaccatgcgggcagtttcacgaccgaagtactgttccagagaacgttggttgattacgattttaccgttgcccggtttgatgaaaacgcgagctgcggaacttttgcggcgaccagtgccgtagtattgattttcagccattgcctataatcccgattagatgtcaagaacttgcggttgctgtgccgcgtggttgtgctcgttacccgcgtaaactttcagtttacggaacatagcacgacccagcgggccttttggcaacatgcctttaaccgcgatttcaatcacacgctcaggacggcgagcaatcatctcttcaaaggtcgcttgtttgataccaccgatgtggccggtgtggtgatagtacactttgtcagtacgcttgttgccggttacagcaactttgtcagcgttcagaacgatgatgtaatcaccggtatctacgtgcggagtgtattccgctttgtgcttaccgcgcaggcgacgagccagttcagtagccagacggcccagagttttaccggtcgcgtcaacaacataccagtcgcgttttacggtttctggtttagctgtaaaagttttcattaaaagcttacccaataaatagttacacgttggtgaacacccaaacgtcttcaattgttgaggttcacacgacaaagtccggcaaacctaccccttcgaatagcctatgccagcacacaaaaagttttgggaaaaaaactttcttgtaacgtggggtcgcaggattatagagaagtcggggtcaaagatcgacccctttttgtgatttgtgacaggttttaacccgccaaatgctcgcgcttcagatactcttcgctttgcatctcttgcagacgactcaggcaacgctggaactcaaacttcagccgatcgccctgataaatttcatacagcggcacttctgcactcaccactaatttgacatggcgctcgtaaaactcatccaccagcgcaataaagcgccgcgcttcgctctccatcaaccgcgtcataactggtacatcaaacaacatgaccgtatgaaagagacgactgagcgcaatatagtcatgctgactgcgggcgtcgacgcacagcgtagtaaaagagaccgccagcgtctggttctcgacgcccattgttgctaatggccgatggttgatttctaacgtcggactattttctcgtttcccccccgccagcgccaaccatagtttatccatttgcgcccgggtttcatcgtgaagtgggctaagccacagatgcgcctgagtgagtgtacgcagacgataatcaacaccagcgtccacgttcattacatcacaatgctgtttaatggcatcgattgcaggcagaaaacgcgcacgttgcaggccatttcgataaagttcatccggcggaatattactcgtcgctaccagggtaataccgcgagcgaacagggctttcatcagaccgccaagtagcatggcatcggtaatatcagaaacaaaaaattcgtcaaaacagagcacgtcagtttcggctttaaagcgatcggcaataatttccagcggatcggtctgcccctgtaaggcagttagctcttcatgcacccgcagcataaaacggtgaaagtgcaggcgctgtttccgctctcccggcaggctttgatagaaaaggtccatcagccaggttttcccgcgtcctacaccgccccacatatataagccacgcactggcgtatgctttgtgtcttcgcgtttaccccacagcttaccgacccgcgccattagcccactcgtcctgggggctggtggcgtgctattgatgagttcctgataaataatttccaggcggctgacggcctctttttgaacgtcgtcgggttgatggctgccttcattaagcgccttcaggtattggcttgttggggtaacgctttgcatgatcttattgttattccttgaataatcggtgcgccgttgttcacggttgacgaaaaaaaggccgttctacactacgcgatatgcagtcgggattccacttctgtggaattaacggttatagtggcataatcagccgcaggcatggagcctgaagccaacaccctacggaaacaaaagacaacgggagatgttcatgacctgggaatatgcgctaattgggttagtcgtcggcatcattattggtgctgtggccatgcgttttggtaatcgtaaactacgccagcaacaggcgttgcagtacgaactggaaaagaataaagctgaactggacgagtatcgcgaagagctggttagccactttgcccgcagcgcggaattactggataccatggcgcacgactatcgccagctgtatcagcacatggcaaaaagctccagcagcctgctgccggaactgtctgctgaagcaaacccgttccgtaatcgtctggcagagtctgaagccagcaacgatcaggcaccggtgcagatgcctcgcgactattctgaaggcgcatccggcctgctgcgtactggcgcgaagcgcgactaatttatttttcgggcgcagccattgcgccctcctcttctctccctccccgactatcatttaatctggtgtctcattgttagccgtctgaaaattcaataacatcaaactgttttgaatctcttttcttatcattcaggtacgagagcaggaataatgaaaaaacaaacccagctgttgagtgcattagcgttaagtgtcgggttaactctcagcgcgagttttcaggccgtcgcgagcattccaggccaggttgccgatcaggcccctctccccagtctggctccaatgctggaaaaagtgcttccggcagtggtgagcgtacgggtggaaggaacggccagtcagggacagaaaatcccggaagaattcaaaaagttttttggtgatgatttaccggatcaacctgcacaacccttcgaaggtttaggctccggtgtcatcatcaacgccagtaaaggctatgtgctgaccaacaaccatgtgattaatcaggcacagaaaatcagtattcagctcaatgatgggcgcgagtttgatgcaaaactgattggtagcgatgaccagagcgatatcgccctgttacaaattcaaaacccgagcaaattaacgcaaatcgctattgccgactccgataaattgcgcgtcggtgattttgccgtagcggtcggtaacccatttggccttgggcaaaccgccacctctggcattgtttccgcattaggccgcagcgggttgaatcttgaaggtctggaaaactttatccagacagatgcttccattaaccgcggtaactccggcggtgcactattaaaccttaacggtgagttaattggcatcaacactgcaatccttgcgcctggcggcgggagcgtcgggattggatttgccatccccagtaatatggcgcgaacactggcgcagcagcttatcgactttggtgaaatcaaacgcggtttgttaggcatcaaaggcaccgagatgagtgccgatatcgccaaagccttcaaccttgacgtgcagcgtggcgcgtttgtcagcgaagtgttgccaggttctggcagcgcaaaagcgggcgtcaaagcgggcgatattattaccagcctcaacggcaaaccgctgaatagctttgctgagttgcgctctcgtatcgcgaccaccgagccgggcacgaaagtgaagcttggcctgctgcgtaacggcaaaccactggaagtagaagtgacgctcgataccagcacctctagcagcgccagcgctgaaatgatcacgccagcgctggaaggtgcaacgttgagcgatggtcagctaaaagatggcggcaaaggtattaaaatcgatgaagttgtcaaaggaagcccagctgctcaggctggcttgcaaaaagacgatgtgatcattggcgtcaaccgcgatcgggtgaacagcattgctgaaatgcgtaaagtgctggcggcaaaaccggccatcatcgccctgcaaattgtacgcggcaatgaaagcatctatctgctgatgcgttaatgtcgtaaaccgggcatcaggcttacgtgtgatgtccggttaactcgtggtatgctgctgccgttcccttttttaatgacgcctccatcatgtttgtgaagctcttacgttccgttgcgattggattaattgtcggcgctattctgctggttgccatgcctagcctgcgcagccttaacccgctttccactccgcaatttgacagtaccgatgagacgcctgccagctataatctggcggttcgccgcgccgcgccagcggtggttaacgtttacaaccgtggtttgaacaccaactctcacaaccagcttgagatccgcaccctgggatccggtgtaatcatggatcaacgcggttatatcatcaccaataaacacgtcatcaacgacgccgatcagatcatcgtcgccttacaggatggacgtgtatttgaagcattgctggtgggatctgactctctaaccgatctggcggtacttaaaattaatgccactggcggtttacctaccattccaattaatgcacgtcgcgtaccgcacattggcgacgtagtactggcgatcggtaacccgtacaacctcgggcagaccattacccaggggattattagtgccacgggtcgaatcggtctgaacccgaccgggcggcaaaacttcctccaaaccgatgcttccattaaccacggtaactctggcggcgcgctggtgaacagcctgggcgaactgatgggcattaatacgctgagctttgataagagtaacgatggcgaaacgccggaaggtatcggctttgcgattcctttccagttagcaaccaaaattatggataagctgatccgcgatggtcgcgtgatccgcggctacattggtatcggcggacgtgagatcgcaccactgcacgcgcagggcggtggtatagatcaactgcaagggatcgtggttaatgaagtgagtcctgacggcccggcggcgaatgcgggtattcaggtcaacgatctgattattagcgtggataacaaaccggccatctctgctctggagacgatggatcaggtggcggaaattcgccctggtagcgtgatccctgtagtagtgatgcgtgatgataagcagttaacgctgcaggtcaccattcaggaatatccggcaaccaattaagtcgtgcgctcaaaacaaaaaaccggagtctgtgctccggttttttattatccgctaatcaattacttattaacgaactcttcgcccagggcgatatctttcttcagcgtatccagcataccttccagcgcgttctgttcaaatgcgctcagggtaccgatagatttacgctcttccacgccgtttttacccagcagcagcggttgagagaagaaacgggcgtactgaccgtcgccttcaacgtaggcacattcgacaacgccttgttcgccctgcagtgcacgaaccagagacagaccaaaacgtgcagctgcctggcccatagacagggttgcagacccgccaccggccttcgcttcaaccacttcagtacccgcgttctggatgcgtttggtcagatcagccacttcctgctcggtaaaactaacgccaggaacctgactcagcagcggcagaatggtaacaccagagtgaccgccaataaccggcacttcaacttcgcctggctgtttgcctttcagttccgcaacaaaggtgttggaacgaatgatatccagcgtggtaacgccgaacagtttgtttttgtcataaacaccggcttttttcagcacttcagcagcaattgcaactgtggtgttaaccgggttagtgataataccaatgcacgctttcgggcaggttttcgcaacttgctgtaccaggtttttcacgatgccggcgttaacgttaaacaggtcggaacgatccatacccggtttacgcgctacgcctgcagagataagaacgacatctgcgccttccagcgccggagtcgcatcttcaccagaaaaacctttgattttcacagcagtagggatatggctcagatcgacagccacaccgggagtcactggagcgatatcatacagagagagttcactaccactaggcagttgggtttttaacagtagtgcaagcgcctggccaataccgccagcagcgccgaggactgcgactttcatcctaaactccttattatattgataaactaagatatgttgctccgctgccgcgaccttaatccacaaaattgccgtttacaatgaccacatctcaagaatgtgtagtcacgcaagtttagcgtttatgcatttaattgccgtaatcaggaacctaacttacgtaattaacagtcgcttatgcattagcgcaacattccaacaggtggtgacaatataccctaccgttcagccaaaacaacatcaatttgataacaattaatttacttttaagcagaatttgcatgccgtgacgcaggcatgtttctcaataacgaaatttgataaaatcccgctctttcataacattatttcagccttcttcagggctgactgtttgcataaaaattcatctgtatgcacaataatgttgtatcaaccaccatatcgggtgacttatgcgaagcagcgctaagcaagaagaactagttaaagcatttaaagcattacttaaagaagagaaatttagctcccagggcgaaatcgtcgccgcgttgcaggagcaaggctttgacaatattaatcagtctaaagtcagccggatgttgaccaagtttggtgctgtacgtacacgcaatgccaaaatggaaatggtttactgcctgccagctgaactgggtgtaccaaccacctccagtccattgaagaatctggtgctggatatcgactacaacgatgcagttgtcgtgattcataccagccctggcgcggcgcagttaattgctcgcctgctggacagtctgggcaaagcagaaggtattctgggcaccatcgctggcgatgacaccatctttaccacccctgctaacggtttcacagtcaaagacctgtacgaagcgattttagagctgttcgaccaggagctttaatctctgccccgtcgtttctgacggcggggaaaatgttgcttatccctctcaaccccctgctttcccctgcgattaatttaacgaatagtgcgttttactgcgacatgtcattcacacaatgaatacataaggtaaaaaaagcacattatgcaaaattcattatctaattgaaaaaactagaattaacgataaataaccgtatttttaattcttttttgttattaaaattcacatttttaacacttagtatcaactgaaacagttagcgcggtattaattagctcaataattagtgtatacttgattttgtgatatgggtcacgaaacaaaggcccagctaaaagattatgtcgaggtaaaaatcatgaaaatcaaaaccactgttgctgcattaagcgtactttctgttctctctttcggtgcattcgctgccgactccattgatgctgcacaagcacaaaatcgtgaagcaatcgggaccgtatccgtaagtggtgtggcgtctagcccaatggatatgcgtgaaatgctgaacaaaaaagcggaagagaaaggcgcaacggcctaccagattactgaagctcgtagcggtgacacctggcacgctacggctgaactgtacaaataaaccctcatcgtcttgtccgacgatattgcccccggttcgggggcttttttttgcgttaatgacgaacattaaaacgcaaatgcccttccagctcttcctctgcctcatcaaacagcaatattaacgcgccaaaacggcgacgcgttttctctcccagatgaacaaattcaatctcaagtggtagcggcaggacatcgttcattaacacatcccatagactgtcgagatcgcgtaccttatctttcgccagaccaaaggtttggctaaagtcacgataaaaatcctcctgactctcaatctcatcaaaatcaaaggtataaatattcatctgttgccaccgtcacgtttcgcggcgagttctgccgtgcatcgctaagtatagccatgaaaaaaccgacgcttttggcgtcggttttgacttaactatcggtcaacgcatgttgatacttatggagcatccccgccagccgatttaccggttccgtcacctgcggtggcgcttgccagatgcgtagcttttcctggtagatttccagttcttccagcaactggccaaagtaccgacgacgtttatcatcgctacgggcagatatcacatggtctgctgtgcggcgcatttgtcggtgaaacgcgcttaaatcctcgttaaccgggatcggtgcatcacgcaggcgctggtgcgcgataatcatcgtcagcgccaggcgaaatttcggcaaatcccctgggaacttattcatcagcaaaaacagctgctgataaagtgccgggaggtggttctctttacgacgtgccacattggtagtcatcgcggaaacagcggcagaaacaaactgattaagcagtacacgtccggtcctgtcgcggcttttatcccgcaccagcaaaataacggtgaacgcgagcacacagccgacgatttgccctaatgcgctgtcgagaaactgactgaaatggaaagtcatcgggttatccagcacgataatatttatggtgctggccagtgcccccatgctgcccagtcgccgtttctgtacttctataccgaggaagaatcccagcactgccaggctaatgcacagcagcaacatgctctgttgggtattagggataatcaccaaaaagtagagcagccctaacggcagcgcggccagcgtcccgtagataaagtcgatcgccaccatgcgtggattcggcaaacgcattgccagactcgtcactaccgcaatcatcaccattgcaccactgccggaagtccagcccgtccacagccagaaaagcgtgcccagaatgcaggaaagtgtggttcgccagaagttaaccattgcatgatgacgttcggcactctctacttttacttccggttcgccttgcaggatctcttcttcggtggcgttgatttttgtgttactgataacgccgcgcttgagaagctgataacgcgttgccgccgcgacccagctataaatggtgacaggcgtttcccgttccccggtccaggcgataactctccgcaggcgtttgagctgcttgtggacgtcctgcgcggtttctaccggcgtgtcaaaaaattcgcggaaagtatcagtgatcaattccgggcgcgtattctgaataagataagtttcgcaggattgggtaatcagcgtcaggcttagcgtattgatcgcttttaaacgtcgattggcccgcgcccagcgggaagattccatattcaggttgctgcgcatgccttgtagcgccgtggtgcgtcgcaccaggtcgccccaggctttatcgacaacttcaccatcgccatgcttgatacagagttgcattaattgatattgcgcgaccagcaaactttccagctctcgatccacttcttgtttgatgcttcgcggagaaaagagcaaatccgccataatcgcacacacaataccgataacgatctcgctacaacgttcgacggcaaactgcggcgtaagcaatggttccggctgaatggtgatcacaatgatcagcgcggtataaccggccagcccccacgcatagctgttttctattcgtaccaggctggatatccaggtacaaaaaccggcccagatacagcacaccagaatcatcaataatggtgcgcggatcatcgcaatgatgatcaccagtccggcaatacagccaataaatgtgccgatgatgcgcaaaaagccacgatagcgaatagcgccagaatacggttcacctcccgcagcaaaggccgtaccggcggcaacaatcgccgctgtcagtaccgcccagcgtggcgtttccagctggaagtgaaagccaacaaacagcgccagtacaatggcggtcgccagttttaccgcaaagcgaatatgttggttagcaatggagaaaatacccatcgtgattaaccaaactcacgcaggcgatgggccattttacggaagaagctatcctggctttcgtcgcgatcttgtttgccagtgaccaccactgtagcagtggtgcccgcaggccagatgttctcttgctggttgtcgagacgaatacgaaccggaacacgttgcgcaagacgcacccattcaaggttagagtctatagtcgccatccctttgtcgtcacgcgtgctgctggcgttggtgacccctgcggcaacactatcaacagtccctttcagcactttgttactgccaagcggcgtgatctctgcacgataccccggacgcaccccttccagcttagtttcttccatataggccagtacatagaaggagttctgtttcaccagcgcaaccgccgtacttcctcgagtaataaactcaccggtatagacgttgaggttggtcacccagccatctgctggcgcgcggatcaccgtgcgttcaagatccagttttgccagatcgcgggtcgcctgcgctttcgctaactgatgcagaaccgtttgtagtacgttgttggcctggtcgatctcttcgcgagacatcgcctgcacaccgagacggttacgacgtccggcctcctggcgtttctcctgtgccagtacctgataataagcaacatcggcttgcgcttcctcaagcgccttttgatagcgcggctggtcgatggtgaacagtatctgtccttttttcaccagctggttatcatgaacattcacctgggtaatgagtccagaaacgtccggcgcgatcgcaacgacgtcagcgctaaagcgcgcgtcacgcgtccagggggattcggtgtaatagacccaggcattaaaaattgcgatgaaggccagaatgactaatacgaccgtgatggccgtacgggagaattttcttattagtgttttcacttcaacctcaaacgaacagtcggcttatcaaataaaacaagcagcaatagagcgcggtgttgaacaacgccggatgccagacaaagtcgtagatacctgttggcacaagtacccggcgcaccagccagaaaatcgccagacttaaaagcaattcaaaaaatatcggtgggaaggacagcccaaacaccacgataacgggaaacagactcatgttgaccttggttgtaaagagagagcaggcgttattattttcagcatctgtcgccgcagagaagggcatggaaagccgggcgagagcaacattgctgtagattgatatttaatatattagcgtaactgttatgctgttatctatattatgtgatctaaatcacttttaagtcagagtgaataatggaacgactaaaacgcatgagcgtgtttgccaaagtagttgaatttggctcttttaccgccgccgccagacagctacagatgagcgttagctccatcagtcagacggtaagtaaactggaagatgagttgcaggtaaagctgttaaaccgtagcacacgcagcattggcctgaccgaagccggtagaatttactaccagggctgccgtcgtatgcttcatgaagtgcaggatgttcatgagcaactgtatgccttcaataacacccccatcgggacgctacgcattggctgttctagtactatggcacaaaatgttctcgccgggctgacagccaaaatgctgaaagaatacccaggtttgagcgtcaatctggttaccggaattccagcccccgacctgattgccgacggtctggatgtggtgatccgcgtcggcgcgttgcaggattccagcctgttttcccgccgtctgggcgcgatgccaatggtggtgtgcgccgcgaaaagctatctcacacaatacggcataccggaaaaacccgccgatttgagtagtcatagttggcttgaatacagcgtgcggcccgacaatgaatttgaactgatcgcaccggaagggatcagcactcgcctgatcccacaaggaagatttgtgactaatgatccgatgacgctggtgcgctggctgacggcgggtgccgggatcgcctacgtgccgctgatgtgggtgatcaacgagatcaatcgtggggagctggagatcctgctgccgcgttaccagagtgatccacgcccggtttatgcgttatataccgaaaaagataagctgccgctgaaggtacaggtcgtgatcaacagcctgacggattattttgttgaggtcggtaaattgtttcaggagatgcacgggcgcgggaaagagaagtaattcatattgtactgttacgttgtacaaacctgtgccaacgggttcccctcaccctaaccctcaccccaaaggggcgaggggaccgttcgtgcacgtagaaagattaattatccttctgaaaatagtgaaattattacgcagtaccgccaacagtcaggttatcgactttcaacgttggctggcccacgccaaccggcaaactttgcccttctttaccgcagacacccacgccgttatccagtttcaggtcgttgccaaccatgctaatctgctgcatggtttcgataccggaaccaatcaacgttgcgcctttcaccggcttcgttactttaccgttttcaatcagatatgcttcactagtggagaaaacgaatttgccggaggtgatatccacctgaccgccaccaaagttcggtgcatagataccgtactcaacggattcaataatttcctgcggggtgcttttacccggcagcatataggtgttggtcatacgcggcatgggcagatgggcgtaggattcacggcgaccgttgccagtcggcgtcatccccatcaaacgcgcgttgagtttatcctgcatgtagcctttcagaatgccgttctcaatcagcacgttgtactggcctggcgtaccttcgtcatcaatcgccacgctacctcggcgatcgaccatcgtgccatcatcaaccacggtacacagttcactagccaccagctccccgacctgtccactaaatacactagtgccacggcggttgaagtcgccttccagaccgtgaccaaccgcttcatgcaacagcacgcccggccaacctgcgccaagtactaccggcatggtgcccgctggtgcagcaacggcagaaagattgaccagcgccatacgcactgcttcttttgcccatgcatccgcacggacttcgccgtcgagatcggcaaggaagaattcataaccaaaacgaccgccgccgccactggcaccgcgttcgcgtttgccatcttcttcgacgagaacgctcacggaaagacgcaccagcggacggacatccgccgctagcgtgccgtcggtggccgcaaccaaaattaattcatagacaccactgaggctggcagtcacttcctgtacgcgcttgtccgcttcgcgggcaaccttatcgacgcgacgcaggatatccagcttctcttcacggctcatgctttgcagcggatctacgctggtatacaacgggctatgctctaccgcgcccagcgtctgtactttaccatcaccactatcacggacgatggtgcgcgccgcttgcgcactctgttccagcgccagcaggctgatttggtcagcgtaagcaaatccggttttttcaccgctgattgcacgcacaccaacgccctgatcgatgttgtaagaaccatctttaataatgcggtcttctaaaacccaggattcgtgatagctgctctgaaaatagagatcgccataatcaaggcgacgttcggccagttgaccgaggatcgcgaacaagtcctgatgtttcaggccgttcgccgctagcaattgttcacttaccaggttaagactcatcgtttttgctactcgttagttactgcagtagaggattttttacggctgccggatgcggcgtgaacgccctatccagcctacggttatgttccggtttgtaggcctgataagacgcacagcgtcgcatcaggcaacggctgtcggatgcggcgtaaacgccttatccgacctacggttatgttccgtttgtaggcctgataagacgcacagcgtcgcatcaggcaacggctgccggatgcggcgtaaacgccttatccgacctacggttatgttccgtttgtaggcctgataagacgcacagcgtcgcatcaggcaacggctgccggatgcggcgtgaacgccctatccgacctacggttatgttctggctcgttggcctttggcaacgattatcctatgagattggggcaattacgcgccctcgtcaaatcattgcgctttttctttacgcggttggcgcaacacttcgttgatttgcggatcgtccagcggaccgctaatgtgatagcgcaaaatggagactttgctccacagcggccccagcactttactggcggcaaacactgccgcgccaacaatggggttaaccgcaaaagccgcagccacgcccaccgtcgcagaaatctctggtgcgacaaccgcttccatattcaggtcgcgacgtaccagatttacgctccctttcatggcgatatccgcctccaggccatccaccagcgtgtcgtcggtgtgcataacgccgtctttaatccacgcggtgctgcgaatggagtcaaaatagaacccttcgccaaaagtgtctctgaaatcaaaacgcagcttacgcatcagggcatctacgctcaataagcgcagcaattgcccggcatgtccggtattgatttcggtaatttcgcctttacccagttgagtatgaatgatgccattcaacgtcgcttcatctggctgccagggtgctttgcgccagtgtaaatcgtaatccacattaaaactgctctggcgtatgggcgtcgtgacaccaaaaaattctgcggcggcatcaattttctgcccgcgcagttttcctttcaggctggtacgttcattccccggattattaacccattcaccatcggcagtaagccggctgaaaccagtatcaatcagtccattggtcagcgttaacgtatcgccagaaatggtgatatcactgtcaatgcgaccgaatttttgcccccagaaccagcactctgtgcatcgtatttgggcgtccggccagccacggaagttaatgcgctccgttgtcgggaaaggactactcggcgtactatcaccacgagttttcgccacgctcgggttgtaataaagatatttgatattcgccagccacggcgcgttattacgcatcgctagcgtggcgttgatttcacgcccttgcgcttcaaccagggtgccatttgccgtcggttggctaacaatactcaggttattccattgctgatttcccagactcaacataggcgtacgtaacgttatgtgttgtgggaaactcgctgcaccaccgacactctccgcagcgcctttctggaacagggccagccactcggcaccattcatcggcggcatattgagttcaacgccactttgttccggcaacggcgggagcgttttactgtctgccgcccaaatagcacgatcgagcgtcagcttttgaccgagcaaccagcggctattgaaatgattatccgcaccagcctgtccggttaattcaaagctgttgagattgccatcaaccttaacgtttaccgctagtggttcacccgcaggtttggctaacggactaggtaagtgactgctcacattctttagatcgccgttcagctctatgttataggtcgcaccagcatgataaggcagatcaatgcccactttaccatcccacgccacgctgccactcaatgcttcgttcaccgcttcaggcagaacgccggttttcgccggttgccagttaccgttgaggtttaccgctacctggtaggcttttgccccttctttggtggaaaaatccacgttcaacggctgattaaaccagcttgctgtcagtggttcactttgcagatcgctattgataaagctgaatttaccgctcaaatttttcagggtgctgtcgagtggtttgataaacagactgttattacgcagcgtcacttcacctttcgcggttaccagttcgccgttcagcgggatatcaagatgtaagcgagcattcacatcgccgtcgagctggagttcttgcagggtcgcacccagagaatctttcagcggtgtctcatcaaagtaagggccaacggctttacccggacctttaatgtcagcgtcaatcagcagtttttctttactgtagtcagggatcactgcggtaagattactcgcgcgcacgccgcccagattaacgccatcggttttcatccataaaccgtcgttaataaagtccagttcaatatcaaggttagttaatgcaggccagtccggctggaaggcaaacttcgcgttgcgcagcggcaccagcacttcaaactgaccttcgttgtgtttataggggaagagttgcggattgccaccataaaccagcgtcgcgttatccgcttcaccgccctgaatcgcgccacttaagtaatcaaccaggtctttacccatcaagttttccgggaaatagcgccaggcttgactaccatcatcggtactgatgccagccagaatacccagccagggttcatcgttagcaggttgcaggtaacgaaaaccgccgcgcgcatggacggctttggctttaacgtcaatattacgcccatccagctggaaacctttgttattgttcagccagcttatagttgcctggccgtcggcgatttctagtggcgcacggaataccgtttcgtaaggcatctttgcctgcttcatgctcgcggtaagcaaaccattttcaacgctgccggaaagcgtcccggagaagtgttccgcacccggtaataatttccattgcttccaggccagatcgctccagcttgcctgaaaacgggtcttgtctgccgcctgaagcgggatatccagcgccagagtgttaatcttgccgctcggttgtgtggagcgccaaacatcacccagtgcaggactaagtttcgcggccagcgggcgtatgccctccaggcctgccagctccagattactggcgcgaatccggagttcgtcactgcgtttattgtctttgccgccaacgtcctgttccggtatccaggccagcgtcaatgctccgctcggccagggtttgccgtccatcgtgatccgtgtatcgggaatagagaactgccagcccggattttcacgcgtaatatgcgcggtcagattatccacgctcagcgtatgcgtttgcttctcgcccaaccagctggcaccgccctgtttcagccagacgtcaccgccggttacatcgcctttgtcgatcgtcatccagccttcaagggagaactgtgccgtttccagcgcaatattgtcctgcatccatttaccgagccacggcttcaggtcgatgtcatccgcctggagccagacgcgaccattgcttaacaacccctcatcatcgcgcaaatccatgcgcacctgcatcacgccgtgctgtccggtaaggctggagaggcttaccaggccttccgcacggtgtcgacgtggatcgttcagccaggtgagttgtgggatcgccagctcggcgcgctgaccggatggcgtcaggaaactgacttcactgtcgcgaagatcgaaatggtcaaattgacgaagaaacagatcgctgatgtgactggcttccagactgtcatcactaccaccgctggtgataggagtgttggtgcgaaagcgcagctgccagaaagtgaggtcgcgaaactgccagcgcatatgtaacaggctctgccagacatccagcgccagagtaacgcgtttaacgctaaattcgccgccatcttttagttctgcacggatgtcgtgtgcttcaagcgtcgggccaaaattctgccagctggcactgagctgactggcttctaccggcatgccagtcgcggattctattttgttgaggatttccggacgccaggcgtcaagatgcggtaaagcaatacgcaggccgctaaccagcagggcagcgatcacaacgagcgcggctccagtaagcagtaaaatccccggcaatcgcctcacccgtcactccttgtctgctaaaaatgtgactcaaaaaccctttgccggatggcggcccagcatctgtttacatcattacgacgtcaaactgctcctggttatagagcggttcaatttgtactttaacctgtttgccaacgaaaatttccacttccgccaggctgtgactctcttcgcctttcaaggcttcagctactgccggagaagcatagaccaggaaacggtcggagtcgtaagcatggtggacacgaacaatctcgcgcatgatttcatagcataccgtttccacggttttcaccgttccgcgaccgtggcaggttgggcattcgttacacagtacgtgctcaatgctttcgcgggtgcgtttacgcgtcatctccaccagccccagcgcgctaaaaccattaacgctggttttcacccggtctttgctcaacgcctgctccaggctgtgcagcactcggcggcggtgatcttcattattcatatcgatgaaatcaataatgataatcccgcccagattacgcaaccgtaactggcgagcgatagcctgcgtcgcttcaatattggtattgaaaatggtgtcgtccagattgcgatgaccgacaaacgctccggtattgatgtccacggtggtcatcgcttcggtctggtcgataatgagataaccaccggatttcagttctactttgcgttccagcgctcgctggatttcgttttcgacatcaaagagatcgaaaatcggctggcgtcctgtgtaatgctccagcttgcttgtcatctcgggaatgtactcgctggtgaactcaagtaacgcttcgtaagtcaggcgactgtcaacgcgaatgcggtccagttcggcatcggcgaaatcacgcagaacacgctgcgccagcgccagttcgccgtacagctgataacgggtctgcgggcgttttttacgctccataactttggtccagacgcgtttcagataagcggcatcggaggccagttcagcctcgccaaccccttccgctgcggtacggatgataaacccgccctgctcgtcgcaatactctgcgaccacttttttcaggcgttcacgttcactttcgctttcaatacgttgggaaaccccaacgtgagaagcccctggcataaacaccagatagcgagaagggagcgtgatatcggtggtcaggcgcgcacctttagtgccaagcggatctttcaccacctgcaccatcagatcttgcccctgacgaaccagttcgctgatgtcgcgcaccgtgaattgcttttgttcttcacccgccacacattcggtgtgcggcatgatgtcggatgcatgaagaaacgcggctttatccagcccaatatctacaaaagccgcctgcatacccggaagtacacgacttacacgacccttgtagatattgcctactattccgcgtcgcgcctcacgttcaatatgaatttcctgcagaataccgccatcaatatacgccactcgcgtttcgctaggcgttacgtttactaacaattcagccgtcatgtttatcccttttctcacgcagtgcgttaaaattacttaataattcatacgtttcaaccagcggtaagccgactacggcgtgatagctgccatttatcttcctgacaaaacagccacccagcccctgaataccgtatgcacctgctttatctaacggttcatcgctggcgacatagcccgcgatgtcttcgtctgttaacgttctgaaagtcacatcggtgaccaccaggcaatcgagaatgtgctggctgtcggccaacgccactgctgtcatcacctgatgggtctgaccgcttaatttgcgcaacatctgcgccgcatgctctgcgtcgcgcggtttctccagcacttctccgttcaggataacgatagtatccgcacccagcaccgggagatccttcgccgtttgcgcgacacctgcccgtgctttctcgcgcgccagacgcacaacatactgctgcgcgctctcctgcggctgacgctgctcctcaatgcccgtaacaatacgttcaaaggtcacgccaagttgcgcaagtaactcctgacgacgcggagaaccggaagctaaatacagagaagtcatagaaacctttattgcactgcaaactgctgacggactttgcgcatcagcaagaaaatccacggccagagcaccccattgactacactactccagaacacttccggtctgaaagagacgttaatcactaaaaactctgcccagaaaacaataatatccaccaccaggctaagcaacatgacgaccagcgcctgctgccataatgcgaggttgcggaaaagctggtatttcagcgccaccaggtaagcaatgatgctcatcgccaatacgcgtacgccaagcgtgctgccgctgatcagatccagtatggcacccatcacaaaacctgtgcccacatttacgcgatgaggcaaggccaggatccaatacaacaagatgagtaacacccagtttggccggaaaacaatcaggttatccggccagggcatgatttgcagcaacagcgcaatgaggaaagagagccagattacccagcgtccctggctacgatagctcgccactattgccctcccggcgcacgttattgccctcccggcgcacgcgcaggcggttgagcaccactttgcggcggcgtagccctttgtggagagcgattagcagcaggctgtgtcggcgcagcaggcgcagtagctgcatttcctgtcgccggttgctgcggagtcggctgagcgatccccgttgccggttcaggtaactttggccccatcgcgtctgggctaggcaatacctgcggcatcatctgcatcagacgttcattagcaacacgatgcacctcttccggcgtcatcgggttagcgccgttacgatctgccccccacagcagcagcagataacgcaaacgttgcagccctgcagtcggacgcgcctgaatcacagtataagcgcgctgggtatcgagttttacggaagagacaaccgcgaccggatagccttccgggaaacgaccgcccagaccggaagtcaccagcacatcaccaacacgaatatccgtattcgccggcagatgctcaagctgcaaatcatccgtacaaccgttaccggctgcaattacgcggatatcgttgcgcagcacctggattggcagcgcgtgggtcgcatcacaaatcagcagcacgcgactggtcagtttagcgacggccaccacctgaccaacaacacctttgtcgctgatgaccggctggccttcataaacgccattaacgctacctttatcgataacaacttgatcgctataaggatcgttaaccgtggagataacctgagtcaccattttctgctcatcctgacgcagcggggaacccagcagctcgcgcagacgcgcgttctcctgtttgtattgtccaagcatcagcagttcactgtttttcagcaacagttcctgacgtaacgcccggttttcaagttctaattggtcacggctggccagcgtctggcttacgccatccagcaattcacgaggagcattggaaacaaagtagaaaggactgacggcggtatccatataagtacggatttgactgaacgtccccaggcggctgtcggcaataataatgccgagcgccaccagcaccgccagaataaggcgaatctgtaggctcgggccacggctaaaaattggcttcataagttatgcgtattctcgtatcagaccaggcagggtaaacagacacttcccctgcctgcatccgattactcttcgctgaacaggtcgccgccgtgcatgtcgatcatttccagcgctttgccgccaccgcgcgccacacaggtcagcgggtcttcagcaacaacgactggaatgccggtttcttccattaacaaacggtcaaggttacgcagcagtgcgccaccaccggtgagcaccatgccgcgctcggagatgtcggaagccagttccggcgggcactgttccagtgcaaccattaccgcgctcacaataccggtcagcggttcctgcagtgcttcgaggatttcattggagttcagggtaaaaccgcgtggaacaccttctgccaggttacggccacgaacttcgatttcacggacttcatcgcccggataagcgctaccgatttcgtgcttgatacgttctgcggtggcttcaccgatcagagaaccgtaattacgacgcacatagttgatgatagcttcgtcgaaacggtcaccaccaatgcgcacagaagaggagtaaaccacaccgttcaaggagataacagcaacttcagtggtaccaccaccgatatcaaccaccatagaaccggtcgcttcagaaaccggcaggccagcaccaattgcggcagccatcggttcttcaatcaggaagacttcacgggcaccagcgccctgcgcggattcacgaattgcgcggcgttcaacctgggtcgcgccaaccggcacacaaaccagaacgcgcgggcttggacgcataaagctgttgctgtgcacttgtttgatgaagtgctggagcattttttcagtcacgaagaagtcggcgataacgccgtctttcattgggcgaatggcagcaatattgcccggcgtacggcccagcatctgcttcgcgtcatgacctactgcagctacgcttttcggactaccggcacgatcctgacgaatggccaccacggaaggctcattcaatacgatgccttgtccttttacataaatgagggtattcgcagtacccaggtcaatggacaagtcattggaaaacatgccacgaaattttttcaacatactaagggataatcctgaaagctggggcggaaaagaaaatccgcttactttaccaaccacacgcagcagcgacaaggcgcaaaaatcatctgctacggtgaaaattagtgcagttcgtttcctttgttacaaatctctgcctgagtccagaaaggcttaatgcatcagcagcattcctcgcctgtttgcaaccgcgtaaggtcattcatctgcatatgtgctgcaacaatctggcgagcagacaagcacactcccatgagacgcagcgcgcattattctacgtgaaaacggattaaacggcaggttaaacgctgtatctttgactatattttttcacgttagtatcaagtggctgactggacgcgaaaaaatccccttgcccgcctgtaacaccgcgctgaatcagggtctgccactcgcttcggctacgcacgccggtggcgtaaacctgggtgctggtcccggagcaggcttccaccaggctttgaaccagcagctggttctccgttcgcttctcaatgtttctgaccagccccggatggagcttgagtaactcaacattaagttctttgatccaactggtacttaccagcgtcaaaccagcctggttgacggctacccgtacccctaaagcattcactaaacgaataacaggttgtaaacgactgatatgttgacctacatcggcctctgcaagttcaataattatgcgttttcgttgacttttttcacattgcattaacgtatcgcgcagccaacgctgaaaacgcgggcgaatcaggctctcaacggtaacctgaatcgccagattttcctctggccagtaacgcaatagtggaataagacggctgatttgcagacggtcatactcttcgcttaagccaaactgcaagaccatcggcatatactccgcgctgctaacctcttcattaccatcgaagatgcggcacatgagttcgcgatgatgaacctgaccttcgcgagtaaccgccggtttttgataaaggcgcgggccgccgcgactgagcatttgctcgataagcgtacgccagcgaacattaccgcgtcctttttcaggcaagctgtcatcgtaaatagcccagctattgccgccctgcaatcccgcattacgcgtggcagactctgcatgttccattacctgctcggtatcctgaccactacgccaggcgcagataccaatgtggatcatatcgtcgcgatcgagcattttattgttcggcaaggtatcaacggctttgattaactgaccggcgatgctctctgcctcttttaacgtccggtgcggtaacagcgcagcaaaatcactgcggtggtaacgcgccagcagtgcgccagggtagcgcatcataaatgtgctcagcagattcgtcagagtgaagaactgttcttcaacctggctgtgcccccaggtatcgctcaacatattgaaatccggcagacgaatcatcatcacgatcccgtgggtacctactttctcctgatcttccagtaacgttgctaactgattatcgaaaaagagtcggttattgaggccggttttcacgtcctgggcggcataagagcggatcagcgtatcaagacggctgtgttgttcgcgtgcgttctgaatttcacgaagcagcgtatccagcgcactgctggttctgggcggccattcatagatggttcccaacacattagagccacgctcaccgtttaagatacgagtagcccgggtttccagcaattcttgcccggcaagttgccgttgtaaccagcgtaccgccaggaagagcataacaatgataaagccaatcgcccccgtgagcggcgcggtggtcatcaagctatggaaatagttgcccatcggatcctgataaaccagacgcaagctcatccccggatgctttatcaacggaacgctcagttcgcgaaacagatcgctggagccaactggacgataactaccatttctggccagggtataaacctgtttatcaccatggagcaggtctacacgaacgatatctgcgctcatcattaattcggtaatttgtggccttaatacgctgaagtcattgctcacaaggtgggtatcaatcgccgtcgccaccgcctgaacgcgatgactaaacttatactgaatggcgttgtagaaacttaggctacagcccagcaaagtcacaaaaattgttaacccggtgagcagcgtaacaaaggcgctaaatttcgtcgttaatctcatccttgtgttaactccgatagtgaggaagcgggcatactagcaaatcagatttatctcgcaatttattgcgcttcatcggctttgcttttccattagcgagtatagtcttcagaaattattttccaatccatcatgcacatgaggaccacttatgcaggcgttacttttagaacagcaggacggcaaaactctcgcaagtgtacagactctggacgaaagtcgcctgccggagggcgatgtcacggtcgatgttcactggagcagcctgaactataaagatgcgctggcgattaccggtaagggaaaaatcatccgtaattttccgatgattcctgggatcgattttgccggaactgtacgcaccagcgaagatccgcgttttcatgccggtcaggaggtgttactcactggctggggcgttggtgaaaaccactggggtgggctggcggagcaggcgcgagtgaaaggtgactggctggttgccatgccgcaagggctggacgcgcgtaaagcaatgattatcggtactgccggttttaccgccatgctgtgtgtgatggcgctggaagatgccggtgttcgcccgcaggacggggagattgtcgtgacgggtgccagtggtggcgtcggcagtaccgccgtggcgctgctgcataagttgggttatcaggtcgttgccgtttccggtcgcgaaagtacccatgaatatctgaaaagtttaggtgctagccgtgttctccctcgtgatgagtttgccgaatcccgtcctctggaaaaacaagtctgggctggggcaattgacaccgttggcgacaaagtgctggcaaaagtgctggcgcaaatgaattacggcggctgcgtggcggcctgtggtctggcgggtggttttactctgccaaccacggtcatgccatttattctgcgtaatgtccgtttgcaaggggtggatagtgtaatgacgccaccagaacgccgcgcacaagcctggcagcgactggtcgccgatttaccggaaagtttctatacccaggcggcaaaagagatatctctgagtgaggcaccgaactttgccgaggccatcattaataaccagatccagggtcgcacgctggtgaaggttaactaaccatttagcagggaataataagagagggaactcattttgaaatcattattcaatcggttaacgggaaaagcggttagccggacagctttcgtcgaacaccttggtcaggaagttatacaacatcatccaaactggaaagtcatgatttcgactgaccacaaattgatgcgcattgatactccactaaacagctattattgatacgcctccgtcgcctgttaggtttatgttgctttgcctgggcgacgctacgcttagccccttacttatttctggtaccatggggtgaataatctgattttgtttgactacaaattaatcactcgaacctatttaatgctgagcattgtcaatcggttaattttgcgtgctttagcattcacatctatccagacgatgcagtgaaaattgggtaatccccagcaaccgctgcgtaatgtcgtctatcttgtcgcgatcctggcatccctacattatttgtggtctgtgaagattatctcattgcagcccctcatcttcgcagggctggcttttcagcttttcaccttacgttataagaagttccgtcgatgatggcgctaatttcgtgaattgtgcggcttgttgcaaattacacggtgttgaaggttatttacatgttagctgttgattatcttccctgataagaccagtatttagctgccaattgctacgaaatcgttataatgtgcgacctcgtcctccctgacgcagtttttgcgctgcggaaaaggtgacattggcgcaacgaaggtatattttgttttttgccggaggatagcagcagatcgctgcacaatgtccgtcaagtctaacattgacactctggggcaaaatagaccggcgtcccggcctgctggaatttatcgctatgcatacagctgtcggggcatacgctttacagacggcggtgaaacgcctgtcacaatcacactaaacaaagagtacggaacccactcatggatattcgtaagattaaaaaactgatcgagctggttgaagaaagtggcatctccgaactggaaatttctgaaggcgaagagagtgtacgcattagccgtgcagctcctgccgcaagtttccctgtgatgcaacaagcttacgctgcaccaatgatgcagcagccagctcaatctaacgcagccgctccggcgaccgttccttccatggaagcgccagcagcagcggaaatcagtggtcacatcgtacgttccccgatggttggtactttctaccgcaccccaagcccggacgcaaaagcgttcatcgaagtgggtcagaaagtcaacgtgggcgataccctgtgcatcgttgaagccatgaaaatgatgaaccagatcgaagcggacaaatccggtaccgtgaaagcaattctggtcgaaagtggacaaccggtagaatttgacgagccgctggtcgtcatcgagtaacgaggcgaacatgctggataaaattgttattgccaaccgcggcgagattgcattgcgtattcttcgtgcctgtaaagaactgggcatcaagactgtcgctgtgcactccagcgcggatcgcgatctaaaacacgtattactggcagatgaaacggtctgtattggccctgctccgagtgtaaaaagttatctgaacatcccggcaatcatcagcgccgctgaaatcaccggcgcagtagcaatccatccgggttacggcttcctctccgagaacgccaactttgccgagcaggttgaacgctccggctttatcttcattggcccgaaagcagaaaccattcgcctgatgggcgacaaagtatccgcaatcgcggcgatgaaaaaagcgggcgtcccttgcgtaccgggttctgacggcccgctgggcgacgatatggataaaaaccgtgccattgctaaacgcattggttatccggtgattatcaaagcctccggcggcggcggcggtcgcggtatgcgcgtagtgcgcggcgacgctgaactggcacaatccatctccatgacccgtgcggaagcgaaagctgctttcagcaacgatatggtttacatggagaaatacctggaaaatcctcgccacgtcgagattcaggtactggctgacggtcagggcaacgctatctatctggcggaacgtgactgctccatgcaacgccgccaccagaaagtggtcgaagaagcgccagcaccgggcattaccccggaactgcgtcgctacatcggcgaacgttgcgctaaagcgtgtgttgatatcggctatcgcggtgcaggtactttcgagttcctgttcgaaaacggcgagttctatttcatcgaaatgaacacccgtattcaggtagaacacccggttacagaaatgatcaccggcgttgacctgatcaaagaacagctgcgtatcgctgccggtcaaccgctgagcatcaagcaagaagaagttcacgttcgcggccatgcggtggaatgtcgtatcaacgccgaagatccgaacaccttcctgccaagtccgggcaaaatcacccgtttccacgcacctggcggttttggcgtacgttgggagtctcatatctacgcgggctacaccgtaccgccgtactatgacagtatgatcggtaagctgatttgctacggtgaaaaccgtgacgtggcgattgcccgcatgaagaatgcgctgcaggagctgatcatcgacggtatcaaaaccaacgttgatctgcagatccgcatcatgaatgacgagaacttccagcatggtggcactaacatccactatctggagaaaaaactcggtcttcaggaaaaataagactgctaaagcgtcaaaaggccggattttccggccttttttattactggggatcgacaacccccataaggtacaatccccgctttcttcacccatcagggacaaaaaatggacactcgttttgttcaggcccataaagaggcgcgctgggcgctggggctgacccttttgtatctggcagtttggttagtagccgcttacttatctggcgttgcccccggttttaccggctttccgcgctggtttgagatggcctgcatcctgacgccgctgctgtttattggactgtgctgggcgatggtgaaatttatctatcgcgatatcccactggaggatgacgatgcagcttgaagtaattctaccgctggtcgcctatctggtggtggtgttcggtatcagcgtttatgcgatgcgtaaacggagcaccggcaccttccttaatgagtatttcctcggcagccgctctatgggcggtattgtgctggcgatgacgctcaccgcgacctatatcagtgccagtagctttatcggcgggccaggagctgcttataaatacgggctgggctgggtattgctggcgatgattcagcttcctgcagtctggcttagtctcggtattctcggcaagaagtttgcgattcttgcgcgccgctacaatgcagtgacgctgaacgatatgctgtttgcccgctaccagagtcgtcttctggtgtggctggcgagtttgagtttgctggttgcgttcgttggtgcgatgaccgtgcagtttatcggcggtgcgcgcctgctggaaaccgcggcgggtattccttatgaaaccgggctgctgatttttggtatcagcattgcgttatataccgcctttggtggctttcgcgccagcgtgctgaacgacaccatgcaagggcttgtgatgctgattggcaccgttgtgctgcttattggcgtagtacatgccgctggcggcttaagtaacgcagtacagaccttgcaaaccatcgatccgcaactggttacgccacaaggcgctgacgatattctgagccctgcctttatgacgagcttctgggtactggtgtgttttggcgtgattggcctgccgcatactgcggtgcgctgtatctcttataaagacagcaaagccgtacatcgggggatcatcatcggtacgattgtggtcgcaattctgatgttcggtatgcacctggccggagcgttaggtcgggcggtgatccccgatctcaccgtaccggacctggtgatcccaacgttaatggtaaaagtgctgccaccgtttgctgccgggatcttcctggctgcaccgatggctgcgatcatgagcacaattaacgcccaactgctgcaaagttccgctacgatcattaaagatctctatctgaatatccgtccggatcaaatgcaaaacgagacgcgtctgaagcggatgagcgcggtaattacgttagttctcggcgcgttgctgctgcttgccgcctggaagccgccagaaatgatcatctggctgaatttgttggccttcggtgggctggaagccgttttcctgtggccgctggtgctgggtctttactgggaacgcgccaacgccaaaggcgcgctaagtgcgatgatcgttggcggcgtgctgtatgccgtactcgcgacgctgaatattcagtacctgggcttccaccctatcgtgcccagcttactactaagtttgctggctttcctggtcggaaaccgtttcggtacatccgtcccgcaagctaccgttttgactactgataaataaagagttttgccatgccttggatccaactgaaactgaacaccaccggcgcgaacgcggaagatcttagcgatgcgctgatggaagcgggtgccgtttctatcacttttcaggatacccacgatacgccagtatttgaaccgctgccgggcgaaacgcgcctgtggggcgacaccgatgtgattggtctgttcgacgctgaaaccgatatgaacgacgtggtggcgattctggaaaaccatccgctgctcggcgcaggcttcgcgcataaaatcgaacaactagaagataaagactgggagcgcgaatggatggataatttccacccgatgcgctttggtgaacgactgtggatctgccctagctggcgtgatgtgccggacgaaaacgccgtcaacgtgatgttagatccagggctggcgtttggtacgggtacccatccaaccacctctctgtgcctgcaatggctcgacagcctcgatttaaccggtaaaacagtcatcgactttggctgtggttccggcattctggcgatcgcggcgctgaaactgggtgcagcaaaagccattggtattgatatcgatccgcaggcgattcaggccagccgcgataacgccgaacgtaatggcgtttctgaccgtctggaactctacttaccgaaagatcagccagaagaaatgaaagccgacgtggtggtcgctaacatccttgcaggcccattacgtgaactggcaccgttaatcagcgtcctgccggttagtggcggtttgctgggcctttccggtattctggcaagccaggcagagagcgtttgtgaagcttatgccgatagcttcgcactggacccggtcgtggaaaaagaagagtggtgccgtattaccggtcgtaagaattaaccttcgcatcgccgtagggtgacgcggggcgaagtgcgagcaagctcacaaaaggcacgtaaatttgccgattatttacgcaaatttgcgtgccaaaattttcattcataaagaaaaattgagaacttactcaaatttctttgagtgtaaattttagtcactattttctaatatgatgatttttatgagtaattatcgcaccacgctcattttaaatgcaattctttgatccatctcagaggattggtcaaagtttggcctttcatctcgtgcaaaaaatgcgtaatatacgccgccttgcagtcacagtatggtcatttcttaactcatgcgcatcggacaatatcagctcagaaatcgcctgatcgcagcgcccatggctggcattacagacagaccttttcggacgttgtgctacgagatgggagccggattgacagtatccgagatgatgtcttctaacccacaggtttgggaaagcgacaaatctcgtttacggatggtgcacattgatgaacccggtattcgcaccgtgcaaattgctggtagcgatccgaaagaaatggcagatgcagcacgtattaacgtggaaagcggtgcccagattattgatatcaatatgggttgcccggctaaaaaagtgaatcgcaagctcgcaggtagtgccctcttgcagtacccggatgtcgttaaaagcatccttaccgaggtcgtcaatgcagtggacgttcctgttaccctgaagattcgcaccggctgggcaccggaacaccgtaactgcgaagagattgcccaactggctgaagactgtggcattcaggctctgaccattcatggccgtacacgcgcctgtttgttcaatggagaagctgagtacgacagtattcgggcagttaagcagaaagtttccattccggttatcgcgaatggcgacattactgacccgcttaaagccagagctgtgctcgactatacaggggcggatgccctgatgataggccgcgcagctcagggaagaccctggatctttcgggaaatccagcattatctggacactggggagttgctgcccccgctgcctttggcagaggttaagcgcttgctttgcgcgcacgttcgggaactgcatgacttttatggtccggcaaaagggtaccgaattgcacgtaaacacgtttcctggtatctccaggaacacgctccaaatgaccagtttcggcgcacattcaacgccattgaggatgccagcgaacagctggaggcgttggaggcatacttcgaaaattttgcgtaaacagaaataaagagctgacagaactatgttcgaacaacgcgtaaattctgacgtactgaccgtttctaccgttaactctcaggatcaggtaacccaaaaacccctgcgtgacagcgttaaacaggcactgaagaactattttgctcaactgaatggtcaggatgtgaatgacctctatgagctggtactggctgaagtagaacagcccctgttggacatggtgatgcaatacacccgtggtaaccagacccgtgctgcgctgatgatgggcatcaaccgtggtacgctgcgtaaaaaattgaaaaaatacggcatgaactaattcaggttagctaaatgcttgattaaaaaggcgctactcggcatggggaagcgccttttttataggtgtcacaaagggagtgaccatgagaacaggatgtgaaccgacccggtttggtaatgaagctaagaccattattcacggtgatgcgcttgccgaacttaaaaagatccccgccgaaagtgtcgatctgatctttgccgacccaccatataacatcggtaaaaattttgatggtctgatcgaagcctggaaagaagatctgtttatcgactggctgtttgaagtgattgcagagtgccaccgcgttctgaaaaagcagggcagcatgtacatcatgaacagtacggaaaacatgccctttatcgatctccagtgccgcaagctttttaccatcaaaagtcgcatcgtctggagttatgacagttctggagtgcaggcgaaaaaacactacggctccatgtacgaacccatcctgatgatggtgaaagacgcaaagaactacacattcaacggtgatgctattctggtagaagccaaaaccggaagccagcgcgcgttgatcgattatcgcaaaaatcctccacagccttacaatcatcaaaaagtaccgggtaacgtttgggattttccgcgcgtgcgttatttgatggatgaatatgaaaaccacccgacgcaaaaaccggaagccttactgaaacgcattattctcgcctcttccaacccaggcgatatcgttctcgacccgtttgctggtagctttactaccggtgccgtagccatcgccagcggacgaaaattcattggtattgagatcaacagcgagtacatcaaaatggggcttcgacggctggatgtcgcgagccattactctgcggaagaactggcgaaagtgaaaaaaagaaagaccggcaacctgagtaaacgaagccggttaagcgaagttgaccccgatctcattacaaagtaaaggatgtgtaagcctggttttcagattattcatttcgtgtatatttcctgccagacttggttaaacatgcacaggctcaggtaatgattcgcaagtattggtggctcgtcgttttcgctgtcttcgtttttctgtttgatactttactgatgcagtggattgaactgctggcaacagaaacagacaaatgccgcaatatgaacagtgttaatccactaaaactggttaactgtgacgaactgaattttcaggacagaatgtgaatttacatgacacttaattcattcgtttgatgaattaatttcgttatgttttcatctggcatgaacattcttaatacgttatcgaccagagcgggggcttgtttataaagatcataacccgccatattcattaaccagttttgaacaattccgctgaaggcaccatcaataataatcatcacaacatctaaatcgaggttatttgctacacaaccttgttgctgacacgcctgcaatacttcgcggagagtctgcggattaaagcccatcttttcgcgtatcactccctcggccagcatctcatcattaaattcacatttgtgatataagattttcagcaacgcctgctggcggggaattttggcaatatattgcaagccgacaatcaatttttcacgcaattgttgaaacgggtcatgctctaatccagccgtcaagtgttcctggattaactcccgcaaactaggctgttgcaaccacatctcattaaacagttgagtcttgttttcgaagtgccagtagatagcgccacgcgtaacgttagcggcgtcggcaatgtcgttgagcgtcgtcttgcttacgccatgctgcgcaaactgggcgatggcagtttcaatcagttcttgccgggtcttcagagcttcggctttggttctttttgccatgattaattattcaggaaataaatatattcgacacagagtgagaaaatagcgaaggttaatctatcacctaatgtgtatttatacgagaggctaatattgagttgctataaatcgttaaataaataatatatattatttacctaagatacattcactacatcaatatatatttcaatttacgaggttttaattctgcctctttcaacccgcgtcaaaataaaacagtagaatattaatctttttttgtgtttatgtgccttgagatgcctgtattcataactattccttacatcgacgaatgataatttgtaggatagcgaactgtatttttctttctgcgagttaacgcgttgcctttttgggtaaataacgcgcttttggttttttgaggaatagtaatgacgaaacatgccaggtttttcctcctgccctcctttattctgatctccgcggctttaatcgccggttgtaacgataagggagaagagaaagctcacgtcggtgaaccgcaggttaccgttcatattgtaaaaacggccccgttagaagttaagactgaattaccaggccgcaccaatgcttatcgtatagccgaagttcgcccacaggttagcgggatcgtactgaatcgcaatttcactgaaggcagcgatgtgcaagcaggccagtccctgtaccagatcgatcccgcgacctatcaggcaaattatgacagcgcgaaaggcgaactggcgaaaagtgaagccgccgccgccatcgcgcatttgacggtaaaacgttacgttccgctcgtgggtacgaaatacatcagccagcaggagtacgaccaggccattgctgatgctcgtcaggccgatgccgccgtgattgccgcaaaagccacagtcgaaagcgctcgcatcaatcttgcttataccaaagtcactgcgccaattagcggacgtatcggcaaaagcactgtgaccgaaggcgctcttgtcactaatgggcaaacgactgaactggcgactgtccagcagctcgatcctatctacgttgatgtgacccaatccagcaacgattttatgaggctgaagcaatccgtagagcaaggaaatttgcataaggaaaacgccaccagcaacgtagagttggtcatggaaaacggtcaaacctatcccctgaaaggtacgctgcaattctccgatgtgaccgttgatgaaagcaccggctccataaccctacgtgctgtcttccctaacccgcaacatacgcttttgccgggtatgtttgtgcgtgcacggattgatgaaggcgtccaacctgacgccattcttatcccgcaacaaggcgttagccgcacaccgcgtggtgatgcaaccgtgctgattgttaacgataaaagtcaggttgaagcgcgccctgtcgttgccagtcaggcgattggcgataaatggttgattagtgaaggactgaaatctggcgatcaagtcattgtcagcggcctgcaaaaagcgcgtccgggagagcaggttaaagccactaccgatacccccgcagatactgcaagcaagtaaggtaatctgacatggcaaacttttttattcgacgaccgatatttgcatgggtgctggccattattctgatgatggcgggcgcactggcgatcctacaattgcccgtcgctcagtatccaacaattgcaccgcctgcggtttctgttagtgcaaactatccgggcgctgatgcgcagaccgtgcaggatacggtgacgcaggttatcgaacagaatatgaacggtatcgataacctgatgtatatgtcctccaccagcgattccgccggtagcgtgacaattacccttaccttccagtccgggaccgatcctgatatcgcgcaagtgcaggtgcagaacaaactccagctcgccacgccgttgctgccgcaggaggttcagcagcaggggatcagtgttgaaaagtccagtagcagctatttgatggtggcgggctttgtctctgataacccaggcaccacacaggacgatatcagcgactatgtggcctctaacgttaaagatacgcttagccgtctgaatggcgtcggtgacgtacagcttttcggcgcacagtatgcgatgcgtatctggctggatgccgatctgctaaacaaatataaactgacaccggttgatgtgattaaccagttgaaggtacagaacgatcagatcgctgccggacagttgggcggaacgccagcgttaccagggcaacaattgaacgccagcattattgctcagacgcggtttaaaaatccggaagaattcggcaaagtgaccctgcgcgtaaacagtgacggcagcgtggtacgcctgaaagatgtcgcacgggttgaacttggcggtgaaaactataacgttatcgctcgtatcaacggaaaaccggcggcgggcctggggattaagctggcaaccggcgcgaatgctctcgataccgcgaaagccattaaggcaaaactggcggaattacagccattcttcccgcagggaatgaaggttctctacccttatgacaccacgccattcgtccagctttctattcacgaagtggtaaaaacgctgttcgaagccattatgctggtgttcctggtgatgtatctgttcttgcagaatatgcgagcaacgctgatccccaccattgcggtacccgtggtgttgttagggacgtttgccatcctcgccgcttttggttactccatcaacacactaacgatgttcgggatggtgcttgccatcgggctgctcgtcgatgatgcgatagtggtggtggagaacgtcgagcgcgtgatgatggaggataagctcccgccaaaagaagcgacggaaaaaagcatgagccaaattcagggcgcactggtgggtatcgcgatggtgctgagtgcggtatttattccgatggcattcttcggcggttctactggggcaatttatcgccagttctctatcaccatcgttagcgcaatggcgctttctgttctggtggcattgattcttacccctgcgttatgtgcaacgctgcttaaacccgtctctgctgagcatcacgaaaataagggcggtttcttcggttggtttaataccaccttcgatcatagcgttaaccactacaccaacagcgtcggcaaaatcctcggatccacaggacgatatttactgatctatgcgctgattgttgcaggaatggtggtgttgtttttacgtcttccgtcttccttcttacctgaagaggatcagggtgtctttctgaccatgattcagttacccgctggcgcgacgcaagagcggacgcaaaaagtgttggatcaagttacggattactatctgaagaacgagaaagcgaacgttgaaagtgtctttacggttaacggctttagcttcagcggccaggcacaaaacgccggtatggccttcgtcagtctgaaaccgtgggaagagcgtaatggtgacgaaaacagtgcggaagcggtaatccatcgtgccaaaatggaattgggcaagatccgcgacggttttgtcattccattcaatatgccagccattgttgaactgggcacggcaacgggtttcgactttgagttaattgatcaggctgggctgggtcacgatgccctaacccaggcccgtaaccagttgcttggtatggcggcgcaacatcctgccagcttagtcagcgtgcgccctaatggcctggaagacaccgcgcagtttaaactggaagttgaccaggaaaaggcgcaggcattaggtgttagtctttctgacatcaatcagaccattagtacggcgctgggtgggacttacgttaacgacttcatcgaccgtggccgcgtgaaaaagttgtatgttcaggcggatgccaaattccgtatgctgccagaagatgtcgataaactttatgtccgcagcgccaacggcgaaatggtgccattcagcgcctttaccactagtcattgggtgtatggctctccgcgactggaacgctacaacggtctgccgagtatggagattcagggggaagccgcgccaggaaccagttccggcgatgccatggcgttgatggaaaaccttgcgagtaaattacctgcgggcattggttatgactggacgggtatgagctatcaggaacgcttaagcggaaaccaggctcccgctctggtagcaatttcctttgtggttgttttcctgtgccttgctgcactctatgaaagctggagtattcctgtcagcgttatgttggtagtgccgttagggattgtcggcgtgctgctggcggcgacactctttaatcaaaaaaatgacgtctactttatggtgggcttgctaacgacaattggcttgagcgccaaaaacgctattttgatcgttgagttcgctaaagatctcatggagaaagagggtaaaggtgttgttgaagcgacactgatggcagtacgtatgcgtctgcgtcctatcctgatgacctctctcgcctttattctcggcgtattaccgctagctatcagtaacggtgccggcagtggcgcgcagaacgctgtgggtatcggggtaatgggaggaatggtctctgcaacgttgctggcaatcttcttcgtaccggtgttctttgtggtgatccgccgttgctttaaaggataaatcagaaacataaaggcgctttcgggtgcctttattatttccagtgaaacccataaaaattaataagatattcttctgctcactctttaaaagctttctatagttcccgctcccttcactatttttacaattcacataatttgtcattattcattccgcaagatttataacctccggtgataaaatggcattcagctcgttaataagagagttaacttattaagcgttagcgtttattactgaggtaacaccatgaaaagattaattcctgtggcattgctcaccgcattgctggcgggctgtgctcacgatagcccctgcgttccggtttatgacgatcagggtcgtctggttcacaccaatacctgtatgaaaggcacgactcaggataactgggaaacggctggggctattgccggcggggcagctgctgttgctggcctgacgatggggatcatcgctctaagcaaataactgaacagggcgcggagttccgcgctctttttaacgatacagtatctctccataagataaaatattgctatattctgctgggtaattccctgctgatttagcatgttacatcgcgttatttcgctgctttcgaaataacgcatcaatttaattttcacacttcccaccagaaatatactcacgctaacaatcattattctgcttagtaaaacacgcgtaaatattttgcgccaaaatgtggcgcatgtttcattttcgcaccattgcggggcgctgtttttattatttcctgtctacactcagcttattgcgacgcgaaatcgtgcgcaaaagctggcactacttttgcttataagaggatggccacagacaggtaaaagacgtttcccaaacgtcctataacgataattttcgcctcacaggaagcattatgaaaaagatgatgatagccacactggctgccgccagcgtgctgcttgccgttgcaaatcaggcgctgctggcgcgacgcttgatgccgttcagaaaaaaggttttgtgcaatgcgggatcagtgatggattacctgggttctcttatgccgatgctgacggtaagtttagtggtattgatgttgatatttgtcgtggtgttgccgctgctgtatttggtgacgacacgaaagtgaaatataccccgctcactgcaaaagaacgcttcaccgctttacagagtggggaggtggatttgctctcccgtaatacgacctggactagttctcgcgatgccgggatgggaatggcatttaccggcgtcacttattacgacggcattggcttcctgacgcacgataaagcggggctaaaaagcgcgaaagaactggatggcgctaccgtctgtattcaggcgggtactgataccgaactcaacgtcgccgactacttcaaggcaaacaatatgaagtacacaccggtgactttcgatcgctctgacgaaagtgcgaaggcactggaatctggtcgctgcgatacgctggccagcgatcaaagtcaactgtatgccctgcgcatcaaattaagcaacccagctgaatggattgtcttaccggaagttatcagtaaagaaccgcttggtccggtagttcgtcgtggcgatgatgaatggttcagcattgtacgctggacgcttttcgccatgctgaatgctgaagagatgggcatcaattcccagaacgtcgatgaaaaagcggctaatccagcaacgcctgatatggcacatctgctgggtaaagaaggcgattacggcaaggatctgaagctggataataaatgggcctataacatcatcaaacaggtgggtaactacagcgaaatttttgagcgtaacgtaggtagtgaaagcccgctgaaaattaaacgtgggcaaaataatctctggaataacggcggtattcagtacgcaccgcccgtgcgttaagtcggtgtgaggtaacgagcgtcgctacggcggcgctctcttcagcgttatgctttccgaggtttctatgtctcatcgccgcagtaccgttaaaggcagtctctcttttgccaaccctacggttcgcgcctggttattccagatccttgccgttgttgctgttgtcggcattgttggttggttatttcacaacactgtaacgaatctcaataatcgtggcattactagtggttttgcctttctggatcgcggcgctggcttcggtattgtccagcatttgatcgattaccagcagggcgacacctacggacgcgtttttattgtcggcttactcaatacgctactggtttctgcattgtgtattgtgttcgcttctgttttgggcttctttatcggtctggcgagacttagcgataactggctgctacgaaagctttccacaatttatattgagatcttccgtaatattcccccgctgctgcaaatcttcttctggtactttgccgtgttgcgcaatttgcccggaccacgccaggctgtgagcgcgtttgatctggcctttttgagcaatcgtgggctttatattccgagtccgcagctgggagacggatttattgcgtttatcctggctgttgttatggctatagtcctttctgttgggctattccgctttaataaaacataccagataaagaccggacaactgcgccgcacctggccgatcgccgcagtgttgatcattggtttgcctttactggcgcaatggctttttggcgcagcactacactgggatgtcccagccctacgaggctttaacttccgcggcgggatggttttaattcctgaactggcagccttaacgctggcacttagcgtttatacatctgcatttatcgccgagattatccgcgctgggatccaggcagtgccttatggtcaacatgaagcggctcggagtctgggattacccaacccggttacgctacgccaggtcattattccccaggcattgcgggtgattattccaccgttaaccagccagtatctcaacatcgtcaaaaactcctctcttgccgccgctattggctatcccgatatggttagcctgtttgccggcaccgtgctgaatcagacggggcaagccatcgagacgatagccatgaccatgagcgtctatctgattatcagcctgactatcagcctgctgatgaatatctataaccgccgcatcgcgatcgttgaacgctaaggagtcatgatgacaaaagtattgctgtctcatcccccgcgcccggcgagccataacagtagccgcgcgatggtgtgggtgcgaaaaaatctgttctccagctggagcaatagcctgctgactattggctgcatatggttgatgtgggaactgatcccaccgttgctgaactgggcatttttgcaggctaactgggttggcagtacgcgtgccgactgcacaaaagccggtgcctgttgggtcttcatccacgaacgatttggtcagtttatgtatgggctttacccacacgaccaacgctggcgaattaacctcgcattactgattgggcttgtgagcatcgcaccaatgttctggaaaatactcccgcatcgcggtcgctatattgcggcctgggcggtgatttacccactgattgtctggtggctgatgtatggcggtttttttgctcttgagcgggttgaaacccggcaatggggcgggctgacgctaactttaattattgcaagtgttgggattgcgggggcgctaccgtgggggatcttactggcgttaggtcgccgctcccatatgccgattgtgcgtatcttaagcgtcatttttatcgaattctggcgcggcgtgccgctgattaccgttctgtttatgtctagcgtcatgctgccgttgtttatggcagaaggcaccagtatcgacaaattgatccgcgcgctggttggcgtgatcctgtttcagagtgcatatgttgcggaagtcgtgcgaggtggattacaggcgctgcctaaagggcaatatgaagcggcagagagcctggcgttgggttactggaaaactcaggggctggttattctgccacaggcgttgaagctggtaattcctgggctggtaaataccatcatcgcactcttcaaagataccagcctggtgatcattatcgggttgttcgatcttttcagtagcgttcagcaggcaaccgttgatcccgcctggttgggtatgagcacggaagggtatgttttcgccgcgctgatctactggatcttctgtttcagcatgagccgctatagccagtatctggaaaaacgttttaacaccgggcgtacaccgcattgaggacactatgagccaaattttactgcaacctgctaacgcgatgattacgctggaaaacgtcaataaatggtatggacaattccatgttttgaaaaatataaatttaaccgtgcaaccgggagaacggatcgttctgtgtggccctagtggttccggtaaaagcacaaccattcgttgtattaatcatctggaagaacatcaacagggacggatcgtggtagatggcatcgaacttaatgaagatatccgcaatattgagcgcgtcaggcaggaagtgggaatggtctttcagcatttcaatctcttccctcatctgaccgttttacagaactgtaccctggcaccgatttgggtacgcaagatgcctaagaaagaggctgaagatctggcggtgcattacctagagcgggtgagaattgccgaacatgcgcataagtttcccggacagattagtggtggtcagcagcaacgcgttgccattgcgcgtagcctgtgtatgaagccgaaaattatgttgtttgatgagccaacgagcgcgctcgatcctgagatggtgaaagaggtgctggatacgatgattgggctggcgcagagcggtatgacaatgttgtgtgtaacacatgagatggggtttgcacgaaccgtcgctgaccgggtaatttttatggatcgtggggaaatagtggagcaagctgcacctgatgaattttttgcgcatcctaaaagtgagcgtacgagggcatttttaagccaggtaatccattaattgaatgttagttcgaaaagcaaaaaggccatcctttcggatggcctttcgcttgatttgatgtctggcagtttatggcgggcgtcctgcccgccaccctccgggccgttgcttcgcaacgttcaaatccgctcccggcggatttgtcctactcgggagagtgttcaccgacaaacaacagataaaacaaaaggcccagtcttccgactgagccttttgttttatttgatgtctggcagttccctactctcgcatggggagaccccacactaccatcggcgctacggcgtttcacttctgagttcggcatggggtcaggtgggaccaccgcgctactgccgccagacaaattcttttctaatctgccgaactttaacctaaaaagtggtgctgatacccagagtcgaactggggacctcacccttaccaagggtgcgctctaccaactgagccatatcagcacgctaaatttgatgcctggcagttccctactctcgcatggggagaccccacactaccatcggcgctacggcgtttcacttctgagttcggcatggggtcaggtgggaccaccgcgctacggccgccaggcaaattctgttttatcagaccgcttctgcgttctgatttaatctgtatcaggctgaaaatcttctctcatccgccaaaacagcttcggcgttgtaaggttaagcctcacggttcattagtaccggttagctcaacgcatcgctgcgcttacacacccggcctatcaacgtcgtcgtcttcaacgttccttcaggacccttaaagggtcagggagaactcatctcggggcaagtttcgtgcttagatgctttcagcacttatctcttccgcatttagctaccgggcagtgccattggcatgacaacccgaacaccagtgatgcgtccactccggtcctctcgtactaggagcagcccccctcagttctccagcgcccacggcagatagggaccgaactgtctcacgacgttctaaacccagctcgcgtaccactttaaatggcgaacagccatacccttgggacctacttcagccccaggatgtgatgagccgacatcgaggtgccaaacaccgccgtcgatatgaactcttgggcggtatcagcctgttatccccggagtaccttttatccgttgagcgatggcccttccattcagaaccaccggatcactatgacctgctttcgcacctgctcgcgccgtcacgctcgcagtcaagctggcttatgccattgcactaacctcctgatgtccgaccaggattagccaaccttcgtgctcctccgttactctttaggaggagaccgccccagtcaaactacccaccagacactgtccgcaacccggattacgggtcaacgttagaacatcaaacattaaagggtggtatttcaaggtcggctccatgcagactggcgtccacacttcaaagcctcccacctatcctacacatcaaggctcaatgttcagtgtcaagctatagtaaaggttcacggggtctttccgtcttgccgcgggtacactgcatcttcacagcgagttcaatttcactgagtctcgggtggagacagcctggccatcattacgccattcgtgcaggtcggaacttacccgacaaggaatttcgctaccttaggaccgttatagttacggccgccgtttaccggggcttcgatcaagagcttcgcttgcgctaaccccatcaattaaccttccggcaccgggcaggcgtcacaccgtatacgtccactttcgtgtttgcacagtgctgtgtttttaataaacagttgcagccagctggtatcttcgactgatttcagctccacgagcaagtcgcttcacctacatatcagcgtgccttctcccgaagttacggcaccattttgcctagttccttcacccgagttctctcaagcgccttggtattctctacctgaccacctgtgtcggtttggggtacgatttgatgttacctgatgcttagaggcttttcctggaagcagggcatttgttgcttcagcaccgtagtgcctcgtcatcacgcctcagccttgattttccggatttgcctggaaaaccagcctacacgcttaaaccgggacaaccgtcgcccggccaacatagccttctccgtccccccttcgcagtaacaccaagtacaggaatattaacctgtttcccatcgactacgcctttcggcctcgccttaggggtcgactcaccctgccccgattaacgttggacaggaacccttggtcttccggcgagcgggcttttcacccgctttatcgttacttatgtcagcattcgcacttctgatacctccagcatgcctcacagcacaccttcgcaggcttacagaacgctcccctacccaacaacgcataagcgtcgctgccgcagcttcggtgcatggtttagccccgttacatcttccgcgcaggccgactcgaccagtgagctattacgctttctttaaatgatggctgcttctaagccaacatcctggctgtctgggccttcccacatcgtttcccacttaaccatgactttgggaccttagctggcggtctgggttgtttccctcttcacgacggacgttagcacccgccgtgtgtctcccgtgataacattctccggtattcgcagtttgcatcgggttggtaagtcgggatgacccccttgccgaaacagtgctctacccccggagatgaattcacgaggcgctacctaaatagctttcggggagaaccagctatctcccggtttgattggcctttcacccccagccacaagtcatccgctaatttttcaacattagtcggttcggtcctccagttagtgttacccaaccttcaacctgcccatggctagatcaccgggtttcgggtctataccctgcaacttaacgcccagttaagactcggtttcccttcggctcccctattcggttaaccttgctacagaatataagtcgctgacccattatacaaaaggtacgcagtcacacgcctaagcgtgctcccactgcttgtacgtacacggtttcaggttctttttcactcccctcgccggggttcttttcgcctttccctcacggtactggttcactatcggtcagtcaggagtatttagccttggaggatggtccccccatattcagacaggataccacgtgtcccgccctactcatcgagctcacagcatgtgcatttttgtgtacggggctgtcaccctgtatcgcgcgcctttccagacgcttccactaacacacacactgattcaggctctgggctgctccccgttcgctcgccgctactgggggaatctcggttgatttcttttcctcggggtacttagatgtttcagttcccccggttcgcctcattaacctatggattcagttaatgatagtgtgtcgaaacacactgggtttccccattcggaaatcgccggttataacggttcatatcaccttaccgacgcttatcgcagattagcacgtccttcatcgcctctgactgccagggcatccaccgtgtacgcttagtcgcttaacctcacaacccgaagatgtttcacttcagagttgcgaaaatttgagagactcacgaacaactttcgttgttcagtgtttcaattttcagcttgatccagatttttaaagagcaaaacttcgcagtgaacctttgcaggtacactctgaagtattttttatttaatcactacagagatggtggagctatgcgggatcgaaccgcagacctcctgcgtgcaaagcaggcgctctcccagctgagctatagccccataacatgtagttaaaacctcttcaaatttgccgtgcaaatttggtaggcctgagtggacttgaaccaccgacctcacccttatcaggggtgcgctctaaccacctgagctacaagcctgtagaggttttactgctcattttcatcagacaatctgtgtgagcactgcaaagtacgcttctttaaggtaaggaggtgatccaaccgcaggttcccctacggttaccttgttacgacttcaccccagtcatgaatcacaaagtggtaagcgccctcccgaaggttaagctacctacttcttttgcaacccactcccatggtgtgacgggcggtgtgtacaaggcccgggaacgtattcaccgtggcattctgatccacgattactagcgattccgacttcatggagtcgagttgcagactccaatccggactacgacgcactttatgaggtccgcttgctctcgcgaggtcgcttctctttgtatgcgccattgtagcacgtgtgtagccctggtcgtaagggccatgatgacttgacgtcatccccaccttcctccagtttatcactggcagtctcctttgagttcccggccggaccgctggcaacaaaggataagggttgcgctcgttgcgggacttaacccaacatttcacaacacgagctgacgacagccatgcagcacctgtctcacggttcccgaaggcacattctcatctctgaaaacttccgtggatgtcaagaccaggtaaggttcttcgcgttgcatcgaattaaaccacatgctccaccgcttgtgcgggcccccgtcaattcatttgagttttaaccttgcggccgtactccccaggcggtcgacttaacgcgttagctccggaagccacgcctcaagggcacaacctccaagtcgacatcgtttacggcgtggactaccagggtatctaatcctgtttgctccccacgctttcgcacctgagcgtcagtcttcgtccagggggccgccttcgccaccggtattcctccagatctctacgcatttcaccgctacacctggaattctacccccctctacgagactcaagcttgccagtatcagatgcagttcccaggttgagcccggggatttcacatctgacttaacaaaccgcctgcgtgcgctttacgcccagtaattccgattaacgcttgcaccctccgtattaccgcggctgctggcacggagttagccggtgcttcttctgcgggtaacgtcaatgagcaaaggtattaactttactcccttcctccccgctgaaagtactttacaacccgaaggccttcttcatacacgcggcatggctgcatcaggcttgcgcccattgtgcaatattccccactgctgcctcccgtaggagtctggaccgtgtctcagttccagtgtggctggtcatcctctcagaccagctagggatcgtcgccttggtgagccgttaccccaccaacaagctaatcccatctgggcacatccgatggcaagaggcccgagggtccccctctttggtcttgcgacgttatgcggtattagctaccgtttccagtagttatccccctccatcaggcagtttcccagacattactcacccgtccgccactcgtcagcgaaacagcaagctgtttcctgttaccgttcgacttgcatgtgttaggcctgccgccagcgttcaatctgagccatgatcaaactcttcaatttaaaagtttgatgctcaaagaattaaacttcgtaatgaattacgtgttcactcttgagacttggtattcatttttcgtcttgcgacgttaagaatccgtatcttcgagtgcccacacagattgtctgataaattgttaaagagcagttgcgacgcggctttcagctcactgtcgcgaggtggcgtatattacgctttcctctttcagagtcaaccctgaatttcaggatttttttctcttcgttgttccgaccatcctgtgaagtgtttcacgttgtcgtctcaacggaggcgcattatagggatcccaattttttgcacaagtatttttttgatctttttttctgtttgttgttttttcaccctttttgctgcaatcgcacacaaaacggtgcttttttgcatactaaaagacttgcacaaggccaataatgcccccaaagtcattagtaaatcatttattgctgaggtaagtatgtctgatgttttacgcccataccgcgatctttttccacaaatcggtcagcgcgtaatgatcgacgatagcagtgtcgtgattggtgacgttcgtctggctgatgatgtggggatctggccgctcgttgtgattcgtggagatgtacattatgtacagatcggagcacgcaccaatatccaggatggcagtatgttgcatgtcactcataaatccagctacaacccagatggcaacccattaaccattggcgaagatgtcactgttggtcacaaggtgatgctccacggctgcaccattggcaatcgagttttggttgggatgggcagtattttacttgatggcgcaatagtagaagatgatgtgatgattggtgcgggtagtctggtcccacaaaataaacggctggagagcggatatctgtatctcggtagccccgtcaaacagatccgcccgttaagtgatgaagagaaggctgggttacgctattccgcgaataattacgtgaaatggaaggacgaatatctggatcagggtaaccagacccagccttgatcatcttcactttgttcctgaattaagttttccgcttcttcttccaggtcccagcgatgctgacgaaaactcgctaaccactgttctggcgtatctccagtaaagcgatacgccagactctcgccagagatcgcgcatgtcagttgcataccattcacgagagcgggaaaacatacacattttttattctcgtcccactcttccctgtccggaaactggatggcctgattcacgcggacaattcctcctgcaattgctttataactggttctacgtcaggcagaacaccgtgccagagaagaaaggcatgagccgcctgtgccaccagcattcctaaaccatcagcattacgcttactgcctcgctgctcacaccatgccagaaaaggagtttttcctttctgatagaacatgtcatagcaataaatgcctggatgaatgaggctactcgggatcgccggaatatcaccactgatgccactggatgttgcattaataatgagatcaaactcatgaccttccagttcgtccatactcaacgcctgaatactgccagtgtgcgcaaacaatttagccaactcttccgcgcgggataccgtccgattagttattgtcaccgcacagtccagggaaaggagtggcagtagtacgccgcgagatgctccaccagcgccgataagcagaatacgtaaaccagggcggataaaagacagacgttccagatcgcttaacaagcctacaccatcggtattgtcacccagcaggcgtccatcttctaaccgcatgagggtattaacagcaccagccaacgctgcccgttcagtaagctcatccgctctggcaaaagcctcttctttaaaaggcaccgtcacattcgcacctttaccaccagcactaaagaaagcgttcagtgtgttgatgaaatcattgatgggtgccaacacgcgcccatagggatgttcaatattcagttgctgagcaaattgctgatgaatgaatgggcttttgctgtgggctatcggattaccaaaaacagcataggtttccattatgttacccctgtcgaaacagttcacccgtcagggcatcgcggatttcactaggatttaaacgcccccccgtttcaccaggcacaaccgggaacgccgcgccaaattgtgcgcgaacttcgtctactgttcgacaaggtggcaatccactcaagttggcactggtagaaaccagcggtttaccataagcctggcacaaagcaaccaccaacggatggtcggtgactcgtacagcaaggctatcaaagcggcccgtcaaccagcgcggtgttgtcgcaggcgcgggaaagacaaaggtgacaggacctggccagcgggaaaaaatggtttcacgctgcacgtcagtcaacatggtgtcatcaatatagggtttaagctgctcgtaatttgctgcgattaaaatcagccccttatcaaccggacgctgttttaactccaacagtcgcatcactgctgtttcgctatcaggatcgcacccaacaccgaaaacggcttccgttggataggcgatgacacgttcttcattgagaacatctatcgcagctgcgatagcgtctctttgcaggttattattcacgttattattccgcgctaaccggctttccacattgtttactggcacaaaagtgttttacaccctgcgcggttttcttttcgatgagtagcggataatgacactcagggcattctccagctatgggtttgaagttaatggcaaattgacactccgggtagcgatcacaagagtgaaatgttttgccataacgggagcggcgctggaccagatggcccgtccgacattgggggcatgtaattgctgtttcgtccggtttatcgataagttcggtatgttcgcattcagggtagttaatgcaaccaataaacataccaaagcgtccctggcgtaataccagatttgcgccacatgcagggcaaacctgcccctccagaactttgacgatatgtccatccgcactagatttcagaggacggacgtagtcacacgccggatactgactgcatccaagaaacggaccgtgtttcccggatcgaataaccagttcagccccgcactttgggcaggactcattattacgcaccgtgaacagtgcacttttcgccataacaacttatgctgaattaaagaaatgattaatgcagcataccttcattcacttcaaagagtaattcttccatttgctggtacgcattttcgcagcccggaatattgaacaacaccatcaggatcacccatttcagatcatccagttcgaactctgcgttatccagcgcgagcactcgctctatcaccatttcacgagtttcaaggttgagcacctgaatctgctcaaggaaaagcagaaacccacggcagctggcatccagtcgttcacactcttccggtgtataaatacgcatggagagaggatcgctggccagttgcatcggttctgccaacccttcctgataatcagcaagtttttccagccatagcagggcattgtagatatcttctcgctcaaaacctgcgtcggtaagatcctgttcaagtttgtcttgatccacacgcaactcagcttctgtgtgaatataggtttcaaacaaatacattagtacgtcgaacatggcatgccctcctcaatcggacatagccgccgggtacagctgcgatccatcctgctaactccagttcgagtagttgagtaactacctctggcacaggttggccggcacgttcagcgacgacgtcaacaggtgttacctcatctcctacgttagccaggagctcaggaaatggcaatgccacgtcttgctgatctggactataaaaactattttcaggggcgtctggcaaccagtgcaatccaaattgcaagttttccagaatttcttccggttccgtcacaagaatcgcaccttgttttattaaccagtgaggcccttcgcttcccggattccctattggacctggcaaggcaaaaacttctcgcccctgctcaagcgcacaacgtgctgtcaccaggctaccactacgcaaagccgcttccaccaccagtacacctttacttagaccactgataatgcgatttcttcgtgggaaattgtaagcaaggggtggaacatcgaggggaaattcgctgacgagagcgcccccctgttcaagcagactggcagccagtcgggcatgacggcggggatgaatggtattaagtccattccccaatacagcaatgctgacgccatttacctgtaaggctgctttatgcgctacaccatcgattccacgcgccagtccactcgtaattgtcactccacgcgtcgccagagtttcgcaaaataatcgtccccatcgctcgccataccaactatgcgcccgactccccactacggcaagctgaaaactatgcagcgcgtgcagttctccttcaacaaacagtgcgccggggtaatctgtcgtcgccagaagttgaggaggataaaattcgctgtccgcaggaattaaatgatggttgggttgctccaaccaacaaagactgctttcgatactctttcgtggaaaactaagaaagcgttgtgcctgccgcaatgtaagccctgtttgctgcaatacaaccgcatcaatatggctctgttttgccacccagtgagcgatacggaccatatcatcgccgtacaagctgctgatactcattaaacgcagccaaatttctgtatcgaccatccttatctccctgccataagcagccttagcaatctttgcgattggtcagtgatgctgtcaatcagagggggatttgtctagaatagaagaaataatctttctaactcctgaacacatctctggagatttatgagtgttttgcaagtgttacatattccggacgagcggcttcgcaaagttgctaaaccggtagaagaagtgaatgcagaaattcagcgtatcgtcgatgatatgttcgagacgatgtacgcagaagaaggtattggcctggcggcaacccaggttgatatccatcaacgtatcattgttattgatgttagcgaaaaccgtgacgaacggctagtgttaatcaatccagagcttttagaaaaaagcggcgaaacaggcattgaagaaggttgcctgagcatccctgaacaacgtgctttagtgccgcgcgcagagaaagttaaaattcgcgcccttgaccgcgacggtaaaccatttgaactggaagcagacggtctgttagccatctgtattcagcatgagatggatcacctggtcggcaaactgtttatggattatctgagtccgctgaaacaacaacgtattcgtcagaaagttgaaaaactggatcgtctgaaagcccgggcttaaggataagaactaacgtgagtgaaagtctacgtattatttttgcgggtacacctgactttgcagcgcgtcatctcgacgcgctgttgtcttctggtcataacgtcgttggcgtgttcacccagccagaccgaccggcaggacgcggtaaaaaactgatgcccagcccggttaaagttctggctgaggaaaaaggtctgcccgtttttcaacctgtttccctgcgtccacaagaaaaccagcaactggtcgccgaactgcaggctgatgttatggtcgtcgtcgcctatggtttaattctgccgaaagcagtgctggagatgccgcgtcttggctgtatcaacgttcatggtagtctgctgccacgctggcgcggtgctgcaccaatccaacgcagtctatgggcgggtgatgcagaaactggtgtgaccattatgcaaatggatgtcggtttagacaccggtgatatgctctataagctctcctgcccgattactgcagaagataccagtggtacgctgtacgacaagctggcagagcttggcccacaagggcttatcaccacgttgaaacaactggcagacggcacggcgaaaccagaagttcaggacgaaactcttgtcacttacgccgagaagttgagtaaagaagaagcgcgtattgactggagtcttagcgcagcacagcttgaacgctgcattcgcgctttcaatccatggccaatgagctggctggaaattgaaggacagccggttaaagtctggaaagcaagcgtcattgatacggcaaccaacgctgcaccaggaacgatccttgaagccaacaaacaaggcattcaggttgcgactggtgatggcatcctgaacctgctcagcttacaacctgcgggtaagaaagcgatgagcgcgcaagacctcctgaactctcgtcgggaatggtttgttccgggcaaccgtctggtctgatagtccactcttctaagcccggtcttgccgggcgtttttatacttatgaaaaaacaacgtaatttacgtagcatggcggcccaggccgttgaacaagtcgtcgagcaagggcaaagtttaagcaacattctgccaccgctccagcaaaaagtttccgataaagacaaagcacttcttcaagagttgtgctttggcgtactgcgtacgcttagccagttagactggctgattaataagttaatggcccgtccgatgaccggcaaacagcggaccgtgcattacctgattatggttggtttgtatcaactgctttatacccgcattccacctcatgctgcgctggctgaaacggttgaaggcgctatcgcaattaagcgtccgcaacttaaagggttgataaacggtgtattacgccagttccagcgtcagcaagaagagttattagccgagtttaatgccagtgatgcacgttatctgcatccttcctggttgctgaagcgtctgcaaaaagcgtatccagagcagtggcaatccatcgtcgaagccaataaccagcgtccgccaatgtggctgcgtattaatcgtacgcatcattcccgcgacagctggcttgcattgctggatgaagcaggaatgaaaggtttcccgcatgcggattaccctgatgctgtacgtctggaaacacctgcacctgttcatgcgctacctggttttgaagacggatgggttaccgttcaggatgcaagtgcacaaggttgcatgacctggcttgcgccacaaaacggtgaacacattttggatctttgtgccgcccccggcggtaaaacaacgcatatccttgaggtggcaccagaagcgcaggttgttgcggttgatatcgacgaacagcgcctctctcgggtttacgacaatttaaaacgccttggtatgaaggcgaccgtgaaacaaggtgatggccgttacccttctcaatggtgtggcgagcaacagtttgatcgcattttattagatgcgccttgtagtgcaaccggtgtgattcgtcgccatccagatattaaatggttacgtcgcgatcgcgatatcccggaactcgcgcaattgcagtctgaaattctcgacgccatttggccgcatttaaaaaccggtggaactctggtctatgccacctgtagcgtgttaccggaagagaatagcctgcagattaaagcctttttgcaacgtaccgctgatgccgaactttgcgaaacaggaacaccagagcaaccgggtaaacaaaatctacctggtgccgaagagggcgacggcttcttttacgctaagctaatcaaaaagtgatgagataacgggtcgcgactgatgaaaattatcattctgggtgccggccaggttggcggcacactggcggaaaacctggttggcgagaacaacgatattactgttgtcgataccaacggtgagcgtctgcggaccttacaggataaatttgacctgcgggtcgtgcaggggcatggctctcatccacgcgtattgcgggaggcaggtgccgacgacgccgatatgctggttgctgtaaccagtagtgatgaaaccaatatggttgcctgccaggtagcctacagtcttttcaacacccctaatcgcatcgctcgtatccgcagtccagactacgtgcgcgatgccgataagctatttcatagtgatgctgtgccgattgatcatctgatcgcaccagagcagttggttatcgataatatttaccgactgattgagtatcccggcgcattgcaggtggtgaacttcgctgagggtaaagtcagcctggctgtggttaaagcctattatggcggcccgctgattggtaatgcacttagcaccatgcgcgaacatatgccacatatcgatactcgtgtggcagcaattttccgccacgatcgccccattcgtccgcaaggtagcaccattgttgaagctggtgatgaagtgttctttattgccgctagtcagcatatccgcgcggtgatgagtgaattacagcgactggaaaaaccgtataagcggatcatgctggttggtggcggtaatatcggtgcagggctggcgcgtcgtctggaaaaagattacagcgttaaactcatcgaacgtaatcagcagcgcgctgccgaactggcggaaaagttacagaatacgatcgtcttttttggtgatgcgagcgatcaagaactactggccgaagaacatatcgatcaagttgatctgtttattgccgtcaccaacgatgacgaggccaatatcatgtccgccatgcttgccaaacgtatgggtgcgaaaaaggtgatggtattgatccagcgtcgcgcttatgtggatctggttcaggggagcgttatcgatattgcgattagtccacaacaagcaactatttctgcgttgcttagccatgtgcgaaaagcagatattgttggtgtttccagtttgcgccgcggcgtagcagaagctattgaagccgttgctcacggtgatgaaagcaccagtcgcgttgtcggcagagtcattgacgaaatcaagctaccgccaggaacgattattggagcggtggtacgtggaaacgacgtgatgattgccaatgacaatctgcgcattgagcaaggcgatcacgtaattatgttcctcacagataaaaagtttattaccgacgtcgaaagactcttccagccaagccctttcttcttgtaattaataaggcgtctaatgacgccttattatttccctttgattatcaaggattaattaaattcattcctggcaggaaaatggcttaacatttgttagacttatggttgtcggcttcatagggagaataacatgagcattattaaagaatttcgcgaatttgcgatgcgcgggaacgtggtggatttggcggtgggtgtcattatcggtgcggcattcgggaagattgtctctagtctggttgccgatatcatcatgcctcctctgggcttattaattggcgggatcgattttaaacagtttgctgtcacgctacgcgatgcgcagggggatatccctgctgttgtgatgcattacggtgtcttcattcaaaacgtctttgattttctgattgtggcctttgccatctttatggcgattaagctaatcaacaaactgaatcggaaaaaagaagaaccagcagccgcacctgcaccaactaaagaagaagtattactgacagaaattcgtgatttgctgaaagagcagaataaccgctcttaacaagcgccactaagcagaagaccagtggtaaaaaagtgatttactttcttgccactggcctcccagttcccccgattgccatgttttccttttcgcatgtaactgcctttccccttcttatttttctctacgcgctgtcggaataagggatcatgtagtaatgcttctatcgcattatcctttatctgccctttagtatgctgatatcgactcataaaaactccagttggttatttaacggcgcgagtgtaatcctgccagtgcaaaaaatcaacaaccactcttaacgccactcgccccttgttcaagagcttcaagaatgctacaataaacactgctatgagcagtcccacaacaggcatcgttaaggcgttgcaaggaacgctgcatactctgcaactcggctatccgtgcttcgacttcctgcaatctttcctgcacaatgcctttactctcctgacaggtatggtgttcaggatcgatgcggatgctcagcaactcgcggatgctctccagactgaaacctagttgtctggcatggcggataaatttcaatcgctggagatcgctttcggtatataggcgaaacccaccttcagtacgcacttcatgctccatcatctgctgtttttcgtaataacgaatcgtgtcgggtgttacttccgccatttttgccagctcaccaatgcgatacatacatactccattagttatcgttgattttgtccaacaacttgtcagcataatcgccgcgtaaaaaatcggtactcaatccagcttgtcgcagcttcaattccagtaaactcaatcgacggctaacctcttgatattgcggatcatcgtgacggatacctttgagaatatccagaagctgaattgcttctctccgttgctcaagttctggcggtaagcaaccggcattcttcagcaagcgataccccgcacgtaattccggtggcacgtgagaatcatcatccagtatcaatggttcgccgctacctgccaggttatcaaactcacctttcgcttgcgcttctgctatatggcgctctgcccactggtcaagtaaccacataaatactccaggggatgaacaaaaagagtacagctattgtagataagtggggatactacgggtataaaaaaacccgccggggcgggtttttttacgttgcttcagattactctgcagcagcttctgctttctcactacgatcaaccagctcgatgtaagccatcggcgcgttgtcgcctgcacggaagccacacttcagaatacgagtgtaaccaccggcacggctcgcgaaacgcgggcccagttcgttaaacagttttgccacgatctcgttatcacgagtacgggcgaatgccagacgacgattagcaacgctatcagtcttggcaagagtaatcagcggctcaactacgcggcgcagctctttcgctttaggcagagtcgtcttgatgatttcatgacgaaccagactacctgccatattgcggaacatagcctggcgatggctgctgttgcggttcagttgacgaccactcttacgatggcgcatgaccttatccttctcagtaaaaccttaacctgtgatccggttactcgtcagcgatgcttgccggtggccagttttccaggcgcatgcccagagacagtccacgggaagccagcacgtctttaatctcagtaagagattttttaccaaggttaggcgttttaaggagctcaacctcggtacgctgtaccagatcaccgatatagtggatagcttctgctttaaggcagttagcagagcggacagtcaattccagatcgtcaacagggcgcagcaggatcggatcgaactctggtttctcttctttcacttcaggctgacgtacatcacgtaagtcaacgaaagcttccagttgttcagccagaatggttgccgcacgacgaatcgcctcttcaggatcgattgtgccgttggtttccatttcgatgaccagcttgtccaggtcggtacgctgttctacacgcgctgcttcaacattgtaggcaatacgctccacagggctgtagcatgcgtcgaccagcagacggccgattgggcgctcatcttcttcgctatgaattcgggtagaagccggcacataaccacgaccgcgctgaactttgatacgcatgctaatagacgcgttctcatcggtcaggtggcagatcacgtgctgcggcttgacgatttcgacatcaccgtcgtgggtgatatcggctgcagtcacagggccaatgccagatttattcaaggtaagaataacttcatctttgccctgaactctcaccgccagccctttcaggttgagcaggatttccaggatatcttcctgaacgccttctttggtgctgtactcatgtagtacaccatcaatctcaacctcggtcaccgcgcaacccggcatgctactgagcagaatacggcgcagtgcgttacccagagtatggccaaagccacgctctaaaggctcaagggtcaccttggcgtgcgtgctactcacttgctcgatatcaaccaggcgcggttttagaaactctgtcacagaaccctgcattgtgtcctctctttggtactaagctttacttggagtaaagctcgacgatcaggtgttcgttaatgtccgcagacagatcagaacgctccggcttacgcttaaacgtaccttccatcttgccagcatcaacttccagccaggttggcttttcacgctgctcagccagctccagagcggctttcacgcgagactgcttcttcgctttctcacgaatgcttacaacgtcattcggactaacctgataagaagcgatgttaacaacacgaccgtttaccataattgctttatggctaaccagctgacgtgcttctgcacgagtggcaccgaagcccatacggtatacaacgttgtccagacgaccttccagcagagccaacaggttttcaccggtgttgcctttcagacgtgctgcttctttgtagtagttacggaactgacgctccagcacaccatagatacggcgaactttttgcttttcacgcaactgcacaccatagtcagacagacgcggtttacgcgcaccgtgctggccaggagcttgttcaattttacacttggtatcgatcgcgcgaacgccagacttaaggaataagtcggtgccctcacgacggctcagcttgagcttaggacccaaatatcttgccattttctttctccaacaaacctggaaaacgaggcgttatacgcgacgttttttcggcggacgacaaccgttatgagggatcggagtcacatcagtaatgttagtgatgcggaaacctgcggcgttcagagcacgaatagtagattcgcggcctggacccggacctttaaccataacttccagattcttgatgccgtattctttcacggcgtcagcgcaacgctctgctgcaacctgagctgcaaacggagtggatttgcgagaaccacggaaaccggaaccaccggctgttgcccaacccaacgcgttaccctgacgatcagtgatagtcacgatggtgttgttgaaagaagcatggatatgagccacgccgtcagagacttgttttcttacacgtttacgtgcacgaattggtgcctttgccattattcaatcaccccgattatttcttgatcggtttgcgcggacccttacgggtacgtgcgttggtcttggtacgctgaccgcgaaccgggagaccacgacgatgacgcaaaccgcgatagcaaccaagatccatcaggcgcttgatgctcatgctgatttcacggcgcagatcaccttcaacgacaaatttggcaacttcgtcacgcagcgtgtcgatttgtccttcagacagctcactgatcttaacatcttcagcgatacccgctgcagccaggatggctttagaacgggtcttgccgacgccataaatgctagttaatgcgattacggcatgcttatgatcaggaatgttaatgcctgctatacgggccactatgcactcctactatttaatatgtacgttccatgctgaaaagcccgttttcaggatactcaaatggaaacgcacagacatacaaaagattggctggctaatctagccagctcaacccaactttgcaagaaaaatatgcgaaaaaatcagccttggcgctgtttatgcttcggctcggcactgcaaatcacacggatgacaccatcacgcttaacgattttgcagttacggcataatttcttgacggaagcacgaactttcatttttactctccgtaacttctcgggcgaccaattatcggccgtagcctttcaggttcgccttcttcaatgcagactcatactgactggacatcatcagagtttgcacttgagccataaagtccataatcacgacaacaacgataagcagactggtcccaccgaagtagaacggtactttcattgcatcacgcatgaactccgggatcaggcagataaaggtaatatacagcgcaccaaccagggtcaggcgggtcattactttatcgatatacttcgccgtttgctctcccggacgaattcctggtacaaatgcaccggacttcttcaggttatctgctgtttcacgcgggttgaaaaccaacgccgtgtagaagaaacagaagaagatgattgcagacgcatagagtaacacataaagcggttgcccaggctgcaaatacaggctaattgttgtcagccagttccaaccagtaccgcccccgaaccaactcgcgatggtcgccgggaacagaataatactggaagcgaagattgccgggattacccccgccatattcactttcagcggtaaatgtgtgctctgtgcagcatagacacgacgaccttgctgacgtttcgcgtagtttaccacaatgcggcgttgaccacgctcaacaaatacaacaaagaacgtcactgcaaatactaatactgcaaccaacagcaacacgaggaagtgcaggtcgccttgacgcgcttgctcgatagtatgggcaatggctggcgggagtcccgcgacaataccggcgaagataatgatactaataccgttgccgatacctcgttcagtaatctgttcgcccaaccacatcaggaacatggttcctgtgaccagacttacaacagcggtgaagtagaatgcaaagcccgggttaatcaccaggccttgcataccaggcatattcggcagaccggtagcaataccgatgctctggaatattgccagcaccagagtaccgtagcgggtgtactggctgatcttacgacgaccagactccccttctttcttaatttctgccaacgttgggtgaaccaccgtcagcagctggataatgatgctcgcgctaatatacggcatgatccccagagcaaagatagaagcacggctgagagcaccaccagagaacatgttaaacatctcaatgatggtgcctcgctgttgctcaagcagtttggcaagtacagcggcatcaataccagggatcggaataaaagagccaatacggaacacaatcagcgcaccgataacaaacagcagtctgcgtttcagctcgcctaagccacctttggcactttgaaaatctaatcccggttgtttagccatctgctacttattcctcgattttaccgccagcagcttcgatagcagcacgagcgcctttagtaacacgcaggccacgaacagttaccggagtcgttacttcgccagccaggatcactttcgcgaactcgatctggataccgataatgttagccgctttcagcgtgttcaggtctactacaccgccttctactttagccaggtcagacagacgaatttcggctgtaatcgctgctttacgagaagtgaagccgaatttcggcagacgacggtacagaggcatctgaccaccctcgaaaccgcgacgtacgccaccgccagaacgagacttctgacctttgtgaccacgaccaccggttttaccgaggccagaaccgataccacgacccaggcgtttacccgcctttttggagccttcggccggagacagagtatttaaacgcatctcttactcctcaactttaaccatgaaggaaaccgcgttgatcataccgcgaatagcaggagtatcctcgcgctctacggtgtgaccaatacgacgcagacccaggccaagcagcgttgccttgtgtttcggcagacgaccgattgcactgcgggtttgagtaattttaatagtctttgccatggtttatttccccagaatttcttcaacggatttaccacgcttggcagcgaccatttctggagaattcatattttccaggccatcaatagttgcacgaaccacgttgatcgggttggtggaaccataggctttagccagaacgttatgaaccccagcgacttccagaacggcgcgcattgcaccaccggcgatgataccggtaccttcggaagccggctgcatgaatacgcgagaacccgtgtgaacacctttaacagggtgttgcagagtgccgttattcagcgcgacgttaatcatattgcgacgggctttttccatcgctttctggatcgctgctggaacttcacgcgctttaccgtaaccaaaaccaacgcgaccgttaccatcgccaactacagtcagagctgtgaaggagaaaatacgaccacctttaacggttttagatacgcggtttaccgcgatcagcttttcctgcagttcgccagcttgtttttcgatgtgagccatcttacacctctaccttagaactgaaggccagcttcacgggcagcatctgccagtgcctggacacgaccatgatattggaacccggaacggtcaaaggatacatctttgatgcctttttccagagcgcgttcagcgacagctttacccacagctgcagccgcgtctttgttaccggtgtacttcagttgttcagcgatagctttttctacagtagaagcagctaccagaacttcagaaccgttcggtgcaattacctgtgcgtaaatgtgacgcggggtacgatgtaccaccaggcgagttgcgcccagctcctggagcttgcggcgtgcgcgggtcgcacgacggatacgagcagatttcttatccatagtgttaccttacttcttcttagcctctttggtacgcacgacttcgtcggcgtaacgaacacccttgcctttataaggctcaggacgacggtaggcgcgcagatccgctgcaacctggccgatcacctgcttatcagcgcctttcagcacgatttcagtctgagtcggacattcagcagtgatacccgcaggcagctgatggtcaacaggatgagagaaacccagagacaggttaatcacattgcctttaaccgctgcacggtaacctacaccaaccagctgcagcttcttagtgaagccttcggtaacaccgataaccatactgttcagcagggcacgcgcggtaccagcctgtgcccaaccgtctgcgtaaccatcacgcggaccgaaggtcagggtattatctgcatgtttaacttcaacagcatcgttgagagtacgagtcagctcgccgtttttacctttgatcgtaataacctgaccgttgatttttacgtcaacgccggcaggaacaacgaccggtgctttagcaacacgagacattttttcctccgattaggctacgtagcagataatttcgccaccaagaccagcctggcgcgctgcacgatcagtcataacacctttagaggtagaaacaactgcgatacccagacccgccataactttcggcagctcatctttacgtttatagatgcgcagacctgggcggctgacacgctgaatgctttctacaacagctttgccctggaaatacttcagagtaagttccagttcaggcttggtgtcgccttcaactttaaaatcttcaataaaaccttcttccttcagcacgttggcgattgccactttcagcttggaggaaggcatggtgaccgcagctttgttcgcggcctgaccgttacggatacgggtcagcatatccgcgatcggatcttgcatgctcatctgtctttactcccgtgattcaattggtgacaattaccagctagcctttttcagacccgggatttcaccgcgcatagcggcttcacggaccttaatacggctcaacccgaacttccgcaggaaaccatgcggacgacctgtttgacggcagcggttacgctgacgagacgggctggaatcacgcggcagagtctgcagcttgagaacagcgttccaacgatcttcgtcggaagcgttcacatcagagatgatcgctttcagttcagcgcgtttcgcgaagtatttatcagctaaagctacgcgttttacttcgcgtgctttcatactttgcttagccatttagtaaccctaccttacttgcggaacgggaagtcaaaggcagccagcagagcgcggccttcttcgtcagatttcgcagtagtggtaatggtaatatccaaaccacgaacgcggtcgactttatcgtagtcgatttctgggaagatgatctgctcacggacacccatgctgtagttaccacgaccgtcgaaagacttagcggacaggccacggaagtcacggatacgaggtacagcaatagtgatcaggcgctcaaagaactcccacatgcgttcgccacgcagagttactttacagccgatcggatagccctgacggattttgaagcctgcaacagatttgcgtgctttggtgatcagcggtttttgaccggagattgctgccaggtctgctgctgcgttatccagcagttttttgtcagcgatcgcttcaccaacacccatgttcagggtgatcttctcgacccgagggacttgcatgacagaattgtagttaaactcagtcatgagttttttaactacttcgtctttgtagtaatcatgcagtttcgccatcgtactactccaaattacttgatagtttcgctgttagacttgaagaaacggacttttttaccgtcttcgaatctaaagcctacacggtcagccttgccggttgccgcattgaagattgctacgttggaaacctgaatagcggcttctttttcaacgatgccacccggttggttcagggccggaaccggcttctgatgtttcttaaccaggttgataccttcaacaatgaccttgccggaagacaggacattcttaactttaccgcgtttacctttatctttaccggttaacacgataacttcgtcatcacgacggattttcgctgccatgattcgctccttagagtacttctggtgccagagagataattttcatgaacttctcactacgaagctcacgagttaccggcccaaaaatacgcgtaccgataggctgctcgctgttgttgttcagaagaacacaagcattaccatcgaagcgaatgacagaaccgtccgggcgacgaacacccttcttggtgcgcaccactaccgccttcagcacatcaccttttttgaccttaccacgcggaattgcttctttgatggtgatcttgatgatgtcgcctacgcctgcgtagcgacggtggctgccacccagaaccttgatacacattacgcgacgtgcaccggagttgtcggcgacgttcagcatagtctgttcttggatcattttagtgctccgctaatgtcaactactactgagacccgaaaatcaggtcgttaaaaatccccatatcgagggcgcggcattataacaccgcttcaaggatatgggtagaaaaaataaacggctcatttctgagccgtttattcgtattgagagagtgtactgtattacagaaccgctttctctacaacgcgaaccagcgtccaggatttagtcttggacagcggacggcattcgcggatttcaaccacgtcaccgataccgcattcgttgttctcgtcatgtacgtgcagtttggtcgtacgcttgatgaatttaccgtagatcgggtgtttcacaaaacgttcgatagcaacaacaatggatttctccattttgtcgctaacaacgcgaccttgcagagtacggattttatcggtcattacgcacccgccttctcgttcagtaaagtcttaacgcgtgcgacatcgcgacgcacttgcttcaacaggtgagactgttgcagctggccacttgcagcctgcatacgcaggttgaactgctcacgcagcaggttcagcagctcggtgttcagctcttcaacgctcttctcacgcagctcttttgctttcattacatcaccgtcttagttacaaaggtggttttaatcggcagtttcgctgctgccagcttgaatgcttcacgggccagctcttccggaacaccgtccatttcatacaggactttacccggctgaatcaaggcaacccaatactccacgttacctttacctttacccatacgcactgccagcggcttttcagtgatcggtttgtccgggaacacacggatccagatcttaccttgacgcttaactgcacgggtcatagcacgacgtgctgcttcgatctgacgggcagtcagacgaccacggccaacagctttcagaccgaagctgccgaagctaacatccgtaccctgcgccagaccgcggttacggcctttgtgcattttacggaattttgtacgctttggttgtaacatcagcgacgctccttatttacggcctttacgctgctgctttttaggctgagcagccggtttttccggttgttcaacagcagccataccacccaggatctcgcctttgaagatccacactttaacgccgattacaccgtaagtggtgtgcgcttcagaggtgttgtagtcgatgtcagcacgcagagtgtgcagcggtacgcgaccttcgcggtaccattcggtacgtgcgatttccgcgccgcccagacggccgctaacttcaactttaatacctttagcgcccagacgcattgcgttctgtacagcacgcttcatagcacgacggaacataacgcgacgttccagctgagaagtgatgctgtcagcaaccagttttgcgtccagttcaggcttacgaacttcggcgatgttgatctgtgcaggaacgccagcgatgtccgctacgaccttacgcagtttttctacgtcttcaccttttttaccgataacgatacccgggcgagcagtgtgaatggttacacggatgctcttagccggacgctcgataacgatacgagatacggacgctttagccagttccttagtcaggtactgacgtactttaaaatcgctgtccaggttgtcagcgaattctttggtgttcgcaaaccaggtagagttccatggttttacaatacccaggcgaataccattaggatgtactttctgacccattgctagtctccagagtctcagcgatcggacacaaccacagtgatgtggctggtgcgcttcaggatgcgatctgcacgaccttttgcacgcggcataatgcgcttcatgctcgggccttcgtctacgaaaattttcgtaactttcagatcgtcaatgtcagcgccatcgttgtgttcagcgttagcaatggcagattccagaactttcttgaccagtacagccgctttcttgttggtgtaggtcaaaatatccagagcctggctcactttcttaccgcgaatcaggtcagcaacaaggcgaaccttctgagcagaagaacgagcatggcgatgtttagcgatagtttccatctcttcctcctaccttatttcttcttcgcttttttatcagcagcgtggccgcgataagtacgagtcggtgcgaattcacccagtttgtgaccaaccatttcgtcggttacaaataccggaacgtgctgacgaccattatggacagcgatggtcaaaccgatcatgttaggaaagatcgtactacgacgggaccaagtgcgcaggggcttcttgtctccgctttccaccgctttctctaccttcttcagcaagtgcaggtcaataaaaggacctttcttgagagaacgtggcatggcttatcctctaaaattatttgctacggcgacgtacgatgaatttatcagtacgcttgttgctgcgggtcttcttacctttggtctgaacgccccacggagttaccgggtgcttaccaaagttacgaccttcaccaccaccatgtgggtggtctaccgggttcatcgcggtaccgcgaacggtcggacgaacaccacgccagcgtgcagcacctgctttacccagaacgcgcagcatatgctcagcattgccaacttcgcccagagttgcacggcagtctgcttctactttacgcatttcaccagaacgcagacgcagggtgacataagcaccatcacgagcaacgatctgaacgtaagtaccagcggaacgtgccagctgaccgcctttacctggtttcatttctacgttatgaacagtagaaccaaccgggatgttgcgcatcggcagggtgttacctggtttgattgcagcatcaacgccagactgaatctggtcgccagctttcaggcctttaggggccaggatgtaacggcgttcaccgtctttgtacagaaccagcgcgatgttcgcggaacggttcggatcgtactcaagacgttcaacaactgccgggataccgtctttgttgcgtttgaagtcaacaatacggtaagcctgcttgtggccaccaccgatatgacgagtggtgatacggccattgttgttacgaccaccggatttgctgtttttttccagcaacggagcaaaaggtttgcccttgtgcagctcagggttaaccactttaactacgtggcgacgacccggagatgtcggtttacatttaacaactgccattgtattactcctccgacttactcagcgccgccaacgaagtccagattctggccttctttcagggtgacgtaagcttttttccagtcgctacgacgaccgatacgctgtccgtgacgtttaactttccctttaactaccagggtgttaacgacttcgacttcgacttcaaacagtttctgcacagcagctttgatttctgctttggtcgcgtctttagcaactttgagtacgatggtgttggatttttccatcgcagtagacgctttttcagaaacgtgcggtgcacgcagcaccttcagcagacgttcttcacgaatcatgccagcatctcctcaacttgcttaacagcatcagcagtcattacgactttgtcgaaggcgatcaggctaaccgggtcgataccagttgcatcgcgtacgtcaaccttgtgcaggttgcgcgcagccaggaacaggttttcgtccagctcaccggtgatgatcagcacatcttccagagccatgtctttcagtttctgtgccagcagcttagttttcggcgcttctacagagaacttctcgacaacgatcagacgatcctgacgtaccagttcggacaggatgcttttcagcgcgccgcggtacatcttcttgttaactttttgactgtggtcctgcggacgagcagcaaaggtcacgccaccagaacgccagatcgggctcttgatagaaccagaacgcgcacggccggtgcctttctggcgccacggttttttaccggaaccagttacttcagcacgagtcttctgagcacgagtaccctgacgagcaccagctgcataagcaacaacaacctggtgaaccagcgcttcgttgaaatcacgaccgaaggtagtttcggaaacagtcagcgcgctctgcgcgtctttcaatactaattccattgctatctccttacgccttcacagctggtttaacgatcaggtcgctaccggttgcacccgggacagcacctttaaccagcagcaggttgcgctcagcgtcaacgcgtactacgtcaaggctctgaacggttacacgttcgttacccatctgacctgccattttcttgcctttgaacactttgcccggagtctggttctgaccgatagaacccggaacgcggtgagacaaggagttaccgtgagtagcgtcctgggtacggaagttccagcgcttaacggtacctgcgaaacctttacctttagaggtgccagttacgtcaacttttttaacgtcagcaaacagttcaacgctaatgctctgacctacagtgaactcttcgccttcagccaggcggaattcccacagaccacggccagcttctacgccagctttagcgaagtggccagcttcaggcttggtcacacggttagcttttttagcaccggtggtcacctgaatagcacggtagccatcgttagccaggtctttaacctgagtaacgcggtttgcttcaacttcgattacggttactgggatagaaacgccgtcttctgtgaagatacgggtcatacccacttttttaccgactaaaccaatcattgtttcaacctctcaatcgctcaatgacctgattaacccaggctgatctgcacgtctacaccggcagccagatccagacgcatcagagcatcaacggttttctcggttggctcaacgatgtcaaccagacgcaagtgagtacggatttcgtactgatcgcgcgcgtctttgttgacgtgcggggagatcagaacagtgaagcgctctttgcgtgtcggcagcgggatcggaccacggacctgcgcaccagtgcgcttggcagtctcgacgatttccgcggttgcttgatcgatcagacgatgatcaaacgctttcaggcggatacggattctttggttctgcatgagaccagagctccaattattttataaacgaaaatgattactcctcagacccattacgattgatgggagagtgtaaccgttcttacgtagctccccgattgggagcattgttaggtagccaaattcggctaactgaggttcagattgaacctgctgtcaactacgacaagcccgcgcattatacatacttaaccaccgaacgcaagcgtattgctagtaaagtaaacagccttcgggttatctctcaagttcgttcagtgcatttttgacacgctctcttaaaccggctttctcttcgctttcttccacagtattttcttcgtcttcagaagaagagggggcattctcaaccgcgacgcctgggtcatcttcctcctcgacggattcgacgacggggagtggctgttttttgaagaaatagtgttgtgtactttgtttaaaagcgggcgtttcagcctctacagtgacttcggcttttactatccaaagcacccatagctgcctggcatacccaccaaccagcaccattcctgcaaaccacaggcaaatcagtaataaacaaattacatatattatggtgctgtgtttttgtcgggagaagataccagggtgacctgtttctttctgctcacgcgcggcgatatagaattcaaacattataatcccttgtgacgtaaaaactgcaaaacaaaagtcctacgcaggaattatttacgttttacgagaacccttcaatatgaattaaattacggcattaaaaataagaaaaaagcctgacaaatgaagcattttaaaaacagaaacattcatatttaaaatgttaaattgaattgatattttaaatatgaataatttattcgttctgacagtacgaataagatatgccgtcaacaaatgcaaaaagggcgccgaagcgcccttttcaattcaaaactaattaacgtgtaattagcccagaactttagcaacaacgcccgcgccaacggtacggccgccttcacggattgcgaaacgcagaccgtcgtccatcgcgatcgggtggatcagggtaacaaccattttgatgttgtcgcccggcattaccatctctacgccttccggcagttcgatggtaccagtcacgtcagtagtacggaagtagaactgcggacggtagcctttgaagaacggagtatgacggccgccttcatctttggacagaatgtacacttcagattcgaacttggtgtgcggcttgatggtgcccggcttagccagtacctgaccacgttcgatttcttcacgtttgataccacgcagcagaacacctacgttctcaccagcacggccttcgtccagcagtttgcggaacatttcaacgccagtacaggtagacttctgagtctctttgataccaacgatttcaacttcttcaccaactttgatgataccgcgttctacacgaccggtaacaacggtaccacgaccggagatggagaatacgtcttcgatcggcagcaggaacggcttgtcaatcgcacgctctggttccggaatataagaatccaggaagccagccagttccaggattttcgcttcccactctgcgtcgccttccagcgctttcagagcagaaccacgaacgatcggagtgtcgtcgcccgggaagtcgtactgagacagaagttcacgaacttccatttcaaccagttccagcagctcttcgtcatcaaccatgtcgcatttgttcaggaacacgatgatgtacggaacgcctacctgacgacccagcaggatgtgctcacgagtctgcggcatcgggccgtcagtcgcagcaactaccaggatcgcgccgtccatctgagcagcaccggtgatcatgtttttaacatagtcggcgtgccccgggcagtctacgtgtgcgtagtgacgggtcggggtgtcgtattcaacgtgagaagtgttgatggtgataccacgagctttttcttccggcgcgttatcgatctggtcgaatgcacgagcagcaccgccgtaggttttagccagtacggtggtgattgcagcggtcagagtagttttaccgtggtcaacgtggccgatagtaccaacgttaacgtgcggttttgtacgttcaaatttttctttagacacggctatattccttactatagtgctctccccttcaggagagagcacgggactttggtattaacccttaggcttatttaccacgggcttcaattacggcctgagcaacgttactcggcgcttcatcatacttcaggaattccatagtgtaacttgcacgacctttggtcagagaacgcagctgagttgcgtatccgaacatttcagacagcggtacttcagcgtggatcttaacgccagtaacttcagattcctgacctttgagcataccacgacgacggctcaagtcaccgataacgtcaccggtgttctcttccggagtttctacttcaaccttcatgatcggctcaagcagaactggtttcgctttcttaaagccttctttaaaggcgatagaagcagccagtttaaacgccagttcagaggagtcaacgtcatggtaagaaccgaagtgcagacgaatacccatgtctactaccgggtagcctgccagcggacctgctttcagctgttcctggatacctttatcaacggccgggatgtattcgccagggattacaccacctttaatgtcgttgatgaactcgtagcctttcgggttactacccggctccagcgggtacatgtcgataacaacatgaccatactgaccacgaccaccagactgtttcgcgtgtttaccttcaacatcggtaactttctggcggatagtttcacggtaagcaacctgcggtttacctacgttcgcttcaacgttgaattcacgcttcatacggtcaacgatgatgtcgaggtgcagttcgcccatacccgcgatgatggtctggttagattcttcgtcagtccatacacggaaagacgggtcttctttagccagacggcccagagccagacccattttttcctggtcagctttggttttcggttcaactgcgatggagattaccggctcagggaattccatacgttccagaatgatcggcgcatccgggtcacacagggtgtcaccagtggttacgtctttcagaccgatagcagcagcgatgtcgcccgcgcgaacttctttgatctcttcacgtttgttagcgtgcatctgaacgatacgaccgaaacgctcacgtgcagctttcacggagttcagtacggtatcaccagagttaaccacaccggagtaaacacggaagaaggtcaggttaccaacaaacgggtcggtagcgattttgaacgccagtgcagagaacggctcgtcatcacttgcgtgacgttcagccggagtgtctttaccgtcgtccaggataccgttgatcgcaggtacgtcaaccggggatggcaggtaatcaattaccgcatccagcatcgcctgaacacctttgttcttgaacgcagaaccacaggttaccaggatgatttcgttgttcagaacgcgctgacgcagagcacctttgatttctgcttcagtcagttcttcaccacccaggtatttttccatcagctcttcagaagcttcagctgcggattcgatcaggttctggtgccattcgttagccagttcaaccatgtctgccgggatatcttcgtattcgaaggttacgccctggtcagcgtcgttccagttgatagctttcattttcaccaggtcaacaacaccggtgaaatgttcttcagcaccaatcgccagctgcagcggaaccgggttcgcgcccagacgggttttgatctggttaacaactttcaggaagttcgcacccatgcggtccattttgttaacgaacgcaatgcgcggaactttatatttgtttgcctgacgccatacggtttcagactgcggctgaacaccaccaactgcgcagtaaaccattaccgcaccatcgagaacacgcatggaacgttctacttcgattgtgaagtcaacgtgccccggggtgtcgatgatgttgatgcgatgcggctcatactgcttagccataccagaccagaatgcagtagtcgcagcggaagtgatggtaataccacgttcctgctcctgctccatccagtccatggttgcagcgccgtcatgaacttcaccgattttatggtttacaccggtgtagaacagaatacgttcggtagtagtggttttaccggcgtcgatgtgcgcactgataccgatgttacggtagcgtgcgatgggtgttgtacgagccatttgtttcctcgtttatcttttaggcgttcaatttaagtagcccaaagcgggctgcttactggaagcgcccgcctggtgactaaaactccgaagggataaccaacggtagtgtgcgaacgccttgttggcttcggccatacggtgaacgtcttcacgtttcttaactgcagtacctttgttttctgcagcatcagaaagttcgttcgccaggcgcagagccatggatttatcaccgcgtttacgagcagcttcaacgatccaacgcattgccagagcattacgacgaaccggacggacttcaactggtacctgataagtagaaccaccaacgcggcgagacttaacttctacagtcgggcgcacgttttcgagagctacttcgaatgcttccagttcagatttaccagagcgctgagccagggtctccagcgcgctgtatacgatagattcagcagtagattttttaccatctaccatcaggatatttacaaatttagccagcagttcacttccgaacttcggatccggcagaattttacgctgaccaatgacgcgacgacgtggcatggaaatactccgttgttaattcaggattgtccaaaactctacgagtttagtttgacatttaagttaaaacgtttggccttacttaacggagaaccattaagccttaggacgcttcacgccatacttggaacgagcctgcttacggtctttaacgccggagcagtcaagcgcaccacgtacggtgtggtaacgaacacccgggaggtctttaacacgaccgccacggatcaggatcacggagtgctcctgcaggttgtgaccttcaccaccgatgtaggaagtcacttcgaaaccgttagtcagacgaacacggcatactttacgcagcgcggagttcggtttacgaggagtggtagtatatacacgagtacatacgccacgtttttgcgggcatgcttccagcgcaggcacgttgcttttcgcaactttgcgagcacgtggtttgcgtaccagctggttaactgttgccattaaatagctcctggttttagcttttgcttcgtaaacacgtaataaaacgtcctcacacaatatgaggacgccgaattttagggcgatgccgaaaaggtgtcaagaaatatacaacgatcccgccatcaccaggccatctggctggggtgcttaaccgtaagtctgacgaaatcagtatagtcaatgagaatgatgtcgttgctaatttgaccagtcaaaccgcgggcaataaggtcttcgttcagggcatagaccttaatgggggcattacgcagactttcaaggtagcggttaccgtcaactgcggcagttacgccatcttgcaataatagcagttcgtctccttcactgagcagacgcagcagcgcagcaaaatccgtcagccagggactgcgatgtaatgtgtgcagcataaacgcctcaaaacctcaaaataacatcgtagttggcgagttcgcggcgtaaggcatctgcttcgagcggcgtggcttcgacaacaaagggtgtctgcggatctaacccgcgttcgcgcagactagccgcacaaacccagcactgttcaatgtcgtacagacccaacaatttaaaagtggcaatgtaatcacgcgccagcactgcatcgggcttttgtcctggcagcagctgaaaaacgccatcagctataaagaagacagccagatcgtcagttaatgcggaagttgccagtaaagcatctaaaccttcccggcctgcggctgtaccatgaggtgcagtagaaaaaacaaacgcaattcgtttcatcagaactgtaccaccctgtcacaggtcaggctggcttccgccagcgccccaagtccgcttaaggtaaatccctgctgaaggttactgctagccagccccagtcttccggcctccgtttcatcaacaacgccacggcgtaatgctgccgctacgcagatattcagcgccacaccatgttgcgcattcagttgttgccaggcccgtacgaggtcaaattcgtcacttgccggagaggtcaattggttagcgttatagaccccttcccgatagaaaaagacgctgcttaactcatggccatctgctatcagcgcctgcgcaaactgaaaagcactactcgcctgttgcgtaccgtatgctggcccggtcaccacgatggcaaaacgcattacttatcttgcccctggaaatcaccgctcttgaactggcggatgtagagatagacagtgtgtttggagatgttcaggcggtcagcaacctggttgatcgcatctttaatatcgaagatccctttctcgtagagattcagcacgatctgacgatttttggcgttattagaaacattgcgatcggcattcacttcttcgatggtgaactccagcgtttgggtaaccagatcttcaacagaagaggcaaagttgacgctactaccgacatccggggtttctggcggcacaaaggtgctcataatctggctgaagggaacatcaagattcatattgatgcacagcagaccaattacacgctgttcgcggttacgaatcgcgatagtcagggacttcattaatacgccgcttttggcgcgagtaaagtagcatttagaaacgctgctatccgctcccgtcatatcgtgcagcatacgtagcgccaggtcagtaattgggctaccaatcttccggcctgtatgttcaccgttagcaatgcgaatggcactacattttagatcctgcaaagagtgcaaaacgatttcacagtgggagccaataagcatcgctaacccgtccaccaccgcttcgtaggatttcagaatatcaaaatcggtctggtcgaaaggacgttgatccagtaaatccaactcactggtttcgttggttaaaaggctcctggacatgaaaaaaaacactccttttcaggagcctgtcgttaacttttcagggcaggctcattaatgatgcgggtaactaaattaatacagcggaggttccgctttccagcactaattatatccggcctgtaataaaaaaaccgccgcctggtcaggcggcggttcttaatgcttattttttagcagaatctgcggctttcgcatcagcttccggctttgcatcagccttcggcgctggtttcacatccagcagctctacgtcaaacaccagggtagaattcggtgggatccccggaacacccgctttgccgtaagccagttctggtggaataaccagtttgatcttaccgcctttcttgatgttcttcagaccttctgtccaacccgggataacaccgtccagacggaaagaaagcggttcaccacgggtgtaagagttgtcgaactctttaccgtcgatcagcgtacctttgtagttcactacaacagtatcgctgtctttcggtgcttcgcctttaccggcttctactacctgataaaccagaccagtactagaggttttcacacctttctctttggcaaatttctcgcggtactctttaccttttgcttcgttatcagccgcgtctttttccatcttcgcctgagcagaagacttcacgcgagcttcgaatgcttgtagagtctgttcgatctcttggtcggagagtttgcttttatcagcaaatgcatcctgaacaccagcgatcagctgatctttatccagtttgatgcccagtttttcttgttcttttagagagttttccatgtaacgacccaggctggcacccagtgcataagcacttttctgatcgtcatttttgaacgctgctttgctgtcagcagctgtagcaggttttgcagcttcagcagcaaaagtgattggtgcatgcagggcaacggccattgtggtcgccagcagcgttactttaaacagacttttcatccatatctccaggatcggggcatctcaccccagggttaactattatcagaagggtactataaagcgttgtcgaacaaatctacatacagacacgccctattatcatctattttcagactctttttgtttaaattagtttcgatgaccgcgaaatgagtgctgtctcgggcagcaaagttaagtagaatccgcggcgaccattcgacaaaagaggtgaatcatgcaggatttaagtttggaagcacgcctggcagagctggagagccgactggcttttcaggaaatcaccattgaagaactgaacgtcacggtgaccgctcatgaaatggagatggcgaaactgcgcgatcatctgcgtctgctgaccgagaagttaaaagccagccagccgagcaacatcgcgagccaggctgaagaaacgccaccgccacattattgaggcgtaaaaaaagcggggattccccgcttttttgtcactttttcggtattagtggcaaccgcaaccgccgttgcctttaccgccacagcagccttcgccaccgtgttcatgaccgtgatcgtggccatgaccgccgcagcaaccgtcgtggtcgtgatcgtggtggtgatcgtgcgcgccgtgaacgtgaccatgagccagttcttcttcagtcgcttcgcgaatcgccacaacttcaacgttgaatttcaggttctgaccggccagcatgtggttaccatcaaccacgacgtgatcgtcttcaaccgcagtgatttcaaccggtaccggaccctggtcggtttcagccaggaaacgcatacctacctgcagttcatcaacgcccataaatacgtctttaggaacacgttgcaccaggttttcgtcgtactgaccgtaagcgtcgttcgcgccaacagcgacatcaaatttgtcgccaacttcatgaccttccagcgccgtttccaggccagagatcagggaaccgtgaccatgcaggtagtccagcggcgcactcaccggagactcatcaaccaacacaccgtcttctgtacgtacctgataggccaggctgaccaccaggtcttttgctactttcatgatatctcctgagcatgggaagaatagtggcgcagattgtagcggaattctgcagccgtgtactcactagcttaaaaaaactcggcgcatatcgttagtccggatgaaaaatcccgatcacttgctcatctttgcgaacgtgatcgcgggcttctttgtctgcttctcgcatctgatgtccgcacttaacacattcaacaatatcaatattattttcgcgccacatcgccatactatcctgcgcctgacaggccgggcattttgcgcccgcaataaaacgttttcggattgccatctttaccctttactcaaattcatcccagccgtccagctggcgtcgttcttgttgcatttcacgctggaaaatctcttccagttcgcgtcgggcttccctggcgcgagaaatttgtacggtatcggcatgcattgggatgagctctcgcagcatccgcatatccaggcggcgaaaatgcagttgcgctcgctgtgcctgatgcggatgcatgccaagcgtgaccagcgtcttgcgccccagctctaacgcactggagaatgtttcacgggaaaactgcgtcacccctgcctgtaataactcatgcgcttccacacgtccgcgcgctcgcgcaagaatatgcaaatgcggaaagtgctgttggcatatttccaccagcttcatggtgtcttccggctcgttacaggtaatgacgatagactcagcggcctctgcacccgcagaacgtaaaagatcgacctgcgtggcgtcgccgtaataaactttgtagccgtatttacgcatcaggttaacggcgctgatatcccgctccagcacggtaatgcgcattttatttgccatcagcaaacgaccaatcacctgaccaaaacgcccgaagcccacgacaatgacctggggtttatcatcgttgacccacggtttttcgtcttcttcttccggtccgttaaactggcgggatagccatttatccaccagcttcatcagcaacggcgtggtcatcatggaaagcgtcaccgtcaccagcaacaacgccatctggtcgccctggaataagcgttgactagaagcggtagaaaagaggacaaaggcaaactcaccaccctgactcaacacgccagcaaactgcatccgctcactgctacgcacgccatacaatcgcgccagcagatacagcacgagaattttcaccgccaccagcacaaccacgcttatcactacccacaacagatgggtataaagcaccccgaggttgagactcatgccgacagagataaagaacaaaccgagcagcaagcctttgaagggatcgatagccgtttccagttcatggcgatattcactttccgccagcagcacgcccgcaataaatgtaccgagcgccatgctcagccccagcgcatccataaacaatgcggaacccaacaccagcagcagcgtcgcggcggtgaacacttcccgcacgccagaagctgcaataaagcggaataccggacgcagtaaatagcgcccaccaatcagcatgccgacaaacgccagcaccttcatgccgaccttcatccagtcgaaatgttcgtctgcgctccccgccaacaacggcactaacgccagtgctgggattactgccagatcctgaaacagcagaacgctaaacccgagctggccggattcgctgcgattcatccctttctcacgcatcaattgcaacgccattgcagtactagacatcgcaaggccaatgccaccgaccaccgccgcctgccaggcgaaatccgtcagcatcaataatcccgccagcaacgccgcgcttaacagcacctgtgccgcgcctacgccaaaaatgctacgccgcagttgccaaagtttggagggattcaactcaaggccgatgataaacatcaggaataccacgccgagttcgctaaagtggaggatctcatcgacgtcgctaataaaccccagcccccacgggccaattgcaatccctgccagcaaatatcccaacacagcgccaatacccagccggcttgccagcggcaccgcagccaccgccgcgaagagaaacagcactcctgcgagtaaaaaatcggaaccttccatcagcggcctcctggagacagcggatttgccagccagtcaccgtaggctctggcgtggctcgccagctcctgtgcgctttgccgtctcgcccagtaaataatgatgggacttaaccaatgcatccggcacatgcccgccgccagttcaaaggggcgcagcacatcgctcatcgggtagcgattcagcgcgtcataacggtaagcactttccggctcgccggtggtaatcacgctacgccagtactttcccgccagttggtttcctcccggcccgctggcaaaaccacgacttaatacccggtccagccactctttcagtagcgccgggcagctataggtataaagaggatgctgaaagacaatcacctcgtgctcgcgcagtaatgcctgctcacgggggatatcaataaaaaaatcgggatagtgcgcgtaaaggtcgtgcacggtaacattgctgagctgcgtggccggtttaagcagtacccggtttgccacgctgtcctgagattccggatgggcatacagcagcaaaactttcgctggctgagacatcatccccctcccggtatggtttttgtgtatagtcgctgttttgggctaccattgcgcccggtgcggcagctcgcccatacattacattatcataatgataagttaacatagtctgaacatacggcaccttatgattgttttctccagcttacaaattcgtcgcggcgtgcgcgtcctgctggataatgccaccgccaccatcaaccctgggcagaaagtcggcctggtgggtaaaaacggctgtggtaaatctaccctgctggcattgctgaaaaatgaaatcagcgccgacggcggcagctacacctttccgggaagctggcaactggcgtgggtgaatcaggaaacgccggcgttaccgcaagcggcgctggaatatgtcattgacggcgaccgtgaatatcgtcaactagaagcgcagctacacgacgccaacgaacgtaacgacgggcacgccattgcgaccattcatggcaagctggatgctattgacgcatggagtattcgctcccgtgctgccagcctgctgcacggcctcggtttcagcaatgaacaactggagcgcccggtaagtgatttttccgggggctggcgtatgcgtcttaaccttgcccaggcgctgatttgccgtagtgacttgctgctgctcgacgaaccgactaaccacctcgatctcgatgccgttatctggctggaaaaatggctgaagagctatcagggcacgctgatcctgatctctcacgaccgcgacttcctcgatccgatcgtcgataaaattattcatatcgaacaacaaagcatgttcgagtacaccggcaactacagtagctttgaagtacagcgcgccacccgtctggcgcagcaacaagcgatgtacgaaagccagcaggaacgcgtagcgcatctgcaaagttatatcgaccgtttccgtgccaaagccaccaaagcgaagcaggcccagagccgcattaagatgctcgagcgtatggagctaattgcccccgcgcacgtcgacaacccgttccgctttagcttccgcgcgccggaaagcctgccaaatccgttactgaagatggaaaaagtcagcgcgggctatggcgatcgcattattctcgacagcattaaactgaacctggtgcccggcagccgtattggtctgttaggccgcaatggcgcgggtaaaagcacattaatcaaactgttagccggtgaacttgcgccagtcagcggtgaaattggtctggcgaaagggatcaaactcggctacttcgcccagcatcaacttgaatacctgcgcgccgacgaaagtcctattcaacatctggcacgtttagcgccgcaggagctggaacaaaaactgcgtgactacctcggcggctttggtttccagggcgataaagtaaccgaagaaacgcgccgcttctccggtggggaaaaagcccgcctggtgctggcattaattgtctggcagcggccgaatctgctgctgctcgacgaaccgactaaccaccttgacctcgacatgcgtcaggcactcaccgaagcattaatcgagtttgaaggcgcgctggttgtcgttagccacgaccgtcatttgctgcgttccaccactgacgatctctacctggttcacgatcgtaaagtcgaaccgttcgacggcgatctggaagattatcaacagtggttgagcgacgtacaaaagcaggaaaaccagaccgacgaagcgccaaaagagaatgcgaacagcgcccaggcacgtaaagatcagaagcgtcgggaagctgagctgcgtgcgcaaacccagccactgcgtaaagagattgcccgtctggaaaaagagatggagaagctgaacgcgcaactggcgcaggcggaagagaaactcggcgacagcgaactgtatgaccagagccgtaaagcggagttgaccgcctgcctgcaacagcaagccagcgccaaatccggcctggaagagtgcgaaatggcatggctggaagcccaggagcagcttgagcagatgctgctggaaggccaaagcaactgatggcgcagataacgacgaccgatgccaatgaattcagcagcagtgctgaattcatccccatgcgcggctttagcaattgtcatctgcaaaccatgctgccgcgtctgtttcgtcgtcaggtgaaattcaccccgtactggcagcggctggagttgcccgacggcgattttgtcgatcttgcgtggagtgaaaaccctgcacaggcgcaacataaacctcgtctggtggtgtttcacgggctggaaggcagtctcaacagcccttacgcccacggtctggttgaggcggcgcaaaagcgcggctggctgggcgtggtgatgcattttcgcggatgcagcggtgaaccaaaccgtatgcaccgcatttaccatagcggcgaaaccgaagacgccagttggtttttacgctggctgcaacgcgaatttggtcatgcgccaacggctgccgtcggctatagcctcggcggtaatatgctggcctgtttgctggcaaaggaaggcaatgatctcccggttgatgcggcggtgattgtctctgcgccgtttatgctggaagcctgtagctatcatatggaaaagggcttttcccgcgtttatcagcgttacttgctgaacctgttaaaagccaatgccgcgcgcaagctggcagcctaccccggaacgctgccgattaatctcgcgcagttaaaaagcgtacgtcgcatccgtgaatttgacgatctcatcaccgccagaattcacggctacgccgacgctatcgactattatcgtcagtgtagcgccatgccgatgctgaaccggatcgccaaaccgacgctgattattcacgccaaagacgatccgtttatggatcatcaggtgatcccgaaaccggaaagtctccccccgcaggtggagtatcaactgactgaacatggcggtcatgttggctttattggcggtacattacttcatccgcaaatgtggctggagagtcgcattcctgactggttaacaacgtatctggaggcgaaaagttgttgatattaacgtatctggaggcgaaatcatgttgattccgtggcaagacctctcccccgaaacgctggaaaatttaattgaaagctttgtgttacgtgaaggcaccgattatggtgaacatgagcgtacacttgaacagaaagtcgccgacgtcaaacgccagctacagtgcggagaagcggtgctggtatggagcgagctgcacgaaacggtcaatattatgccgcgcagtcagtttcgcgaataacctgcaaccgtcggcggacgagataataatgatagctaagtcatggagttactatgtctgccaaacatccggtcattgcggtaacaggatccagcggcgcggggaccaccaccaccagcctcgcgtttcgtaaaatattcgcgcagttaaatctgcatgcagctgaggtggaaggcgacagttttcaccgttacacccgcccggaaatggacatggcgatccgcaaagcgcgcgacgccgggcggcatatcagctacttcggccccgaggctaacgacttcggcctgctggaacaaaccttcattgaatacggtcagagcggcaaagggaaatctcgcaaatatctgcatacctacgacgaagccgtaccgtggaatcaggtaccggggacattcaccccctggcaacctttaccggaacccactgatgtactgttttatgaaggtttacacggcggcgtagtcacgccacagcataacgttgcgcagcatgtggacttactggtcggcgtggtgcctatcgttaaccttgagtggattcaaaaactgatccgcgacaccagcgagcgcgggcacagtcgagaagcagtgatggacagtgtagtgcgtagtatggaagactatatcaactacatcacaccgcagttttcccgcacccatcttaacttccagcgcgttcccaccgtcgacactagtaacccgttcgcggcaaaaggtatcccgagcctcgatgaaagctttgtggtgatccattttcgtaatctggaagggatcgatttcccctggctgctggcgatgttgcaaggcagtttcatttcccacatcaatacgttagtggtaccgggcggcaaaatgggtctggcaatggaattaattatgctgccgctggtgcaacgattgatggaaggaaagaaaatcgagtaactctgctattacgccggataaaatactatccggcttcacaacgggatagttaagtcacgcggcaaccacttcatagctgtgagtaatattcaccgctttttccagcatcaacgccacactacaatatttctcggcagagagatcaaccgcacgcgcaaccgctgcgtctttcaggtcgcgaccggtgacgataaaatgcagattaatgtgcgtaaacaggcgtggtgcctcttcgcggcgttcagaggtcaattttacttcacaatcgaccacatcctgacgccctttttgcaggatgctaaccacatcgatggcactgcaaccacccgccgccatcaacaccatttccatcggacttggtgctttatcgccactgttgccgtccattaaaatctgatgaccagaggcggattcgcccagaaaagttaacccttcgacccacttcactcgcgcttgcatttttgctactccactgcgtcaattttcctgacagagtacgcgtactaaccaaatcgcgcaacggaaggcgacctgggtcatgctgaagcgagacaccaggagacacaaagcgaaagctatgctaaaacagtcaggatgctacagtaatacattgatgtactgcatgtatgcaaaggacgtcacattaccgtgcagtacagttgatagccccttcccaggtagcgggaagcatatttcggcaatccagagacagcggcgttatctggctctggagaaagcttataacagaggataaccgcgcatggtgcttggcaaaccgcaaacagacccgactctcgaatggttcttgtctcattgccacattcataagtacccatccaagagcacgcttattcaccagggtgaaaaagcggaaacgctgtactacatcgttaaaggctctgtggcagtgctgatcaaagacgaagagggtaaagaaatgatcctctcctatctgaatcagggtgattttattggcgaactgggcctgtttgaagagggccaggaacgtagcgcatgggtacgtgcgaaaaccgcctgtgaagtggctgaaattagctacaaaaaatttcgccaattgattcaggtaaacccggacattctgatgcgtttgtctgcacagatggcgcgtcgtctgcaagtcactagtgagaaagtgggcaacctggcgttcctcgacgtgacgggccgcattgcacagactctgctgaatctggcaaaacaaccagacgctatgactcacccggacggtatgcaaatcaaaattacccgtcaggaaattggtcagattgtcggctgttctcgtgaaaccgtgggacgcattctgaagatgctggaagatcagaacctgatctccgcacacggtaaaaccatcgtcgtttacggcactcgttaatcccgtcggagtggcgcgttacctggtagcgcgccattttgtttcccccgatgtggcgcagactgatttatcaccccgatatcaactatgcacttcgacaaacgctggtgctatgtttgcccgtggccgttgggttaatgcttggcgaattacgattcggtctgctcttctccctcgttcctgcctgttgcaatattgcgggccttgatacgcctcataaacgttttttcaaacgcttaatcattggtgcgagcctgtttgccacctgtagcttgctgacacagctactactggcaaaagatgttcccctgccctttttgctgaccggattaacgctggtacttggcgtcactgctgagctggggccattgcacgcaaaattgcttcctgcaagcctgctcgccgccatttttaccctcagtttggcgggatacatgccggtctgggaaccgttgctcatctatgcgttgggcactctctggtacggattgtttaactggttttggttctggatctggcgcgaacaaccgctgcgcgagagtctaagtctgctgtaccgtgaactggcagattattgtgaagccaaatacagcctgcttacccagcacaccgaccctgaaaaagcgctgccgccgctgctggtgcgccagcaaaaagcggtcgatctaattacccagtgctatcagcaaatgcatatgctttccgcgcaaaataatactgactacaagcggatgctgcgtattttccaggaggcgctggatttacaggaacatattagcgtcagtttgcatcagccggaagaggtgcaaaagctggtcgagcgtagccatgcggaagaagttatccgctggaatgcgcaaaccgtcgccgctcgcctgcgcgtgctggctgatgacattctttaccatcgcctgccaacgcgttttacgatggaaaagcaaattggcgcactggaaaaaatcgcccgccagcatccggataatccggttgggcaattctgctactggcatttcagccgcatcgcccgcgtgctgcgcacccaaaaaccgctctatgcccgtgacttactggccgataaacagcggcgaatgccattacttccggcgctgaaaagttatctgagtctaaagtctccggcgctacgcaatgccggacgactcagtgtgatgttaagcgttgccagcctgatgggcaccgcgctgcatctgccgaagagctactggatcctgatgacggtattgctggtgacacaaaatggctatggcgcaacccgtctgaggattgtgaatcgctccgtgggaaccgtggtcgggttaatcattgcgggcgtggcgctgcactttaaaattcccgaaggttacaccctgacgttgatgctgattaccaccctcgccagctacctgatattgcgcaaaaactacggctgggcgacggtcggttttactattaccgcagtgtataccctgcaactattgtggttgaacggcgagcaatacatccttccgcgtcttatcgataccattattggttgtttaattgctttcggcggtactgtctggctgtggccgcagtggcagagcgggttattgcgtaaaaacgcccatgatgctttagaagcctatcaggaagcgattcgcttgattcttagcgaggatccgcaacctacgccactggcctggcagcgaatgcgggtaaatcaggcacataacactctgtataacagtttgaatcaggcgatgcaggaaccggcgtttaacagccattatctggcagatatgaaactgtgggtaacgcacagccagtttattgttgagcatattaatgccatgaccacgctggcgcgggaacaccgggcattgccacctgaactggcacaagagtatttacagtcttgtgaaatcgccattcagcgttgtcagcagcgactggagtatgacgaaccgggtagttctggcgatgccaatatcatggatgcgccggagatgcagccgcacgaaggcgcggcaggtacgctggagcagcatttacagcgggttattggtcatctgaacaccatgcacaccattagcagcatggcatggcgtcagcgaccgcatcacgggatttggctgagtcgcaagttgcgggatagcaaggcgtaatgcaggctaaaccatcggataaggcattcacgccgcatccgacatcttttgcctgatgcttcgtatttacgccccaaccaccttcgccaccgcgtgggcgaaacgttgcatcccttcatcgatatccgcatcttccaccaccaggctcggtgcaaaacgcatcacatccggtccggcattcagcaccattacgccagcctctgcgcccgcatacaggaaatcacgcgcccgacctttgtactgtggtttcagctctgcgccaatcaacagccccataccgcgaatatcgctaaatacatcgtactgctgatcgatcttctgcagatggtcaacaaaacgctggcgtttcgcctgaatgccttccagcacttcaggggtattgatgatatcaaacgccgcccccgctactgcacaggccagaggattaccgccgtaggtggaaccgtgagaaccaggatgaaacgcagaagcaatttccgccgtggtcagcatggcgctaatcgggaagccgccgcctaacgctttcgcagaggtcagaatatccggcgtaacgccgtagtgcatgtaagcaaacaaatcgccggtccgccccatcccgcactgcacttcatcaaacaccaataatgcctgatgttgatcgcacagctcgcgcaagccctgcaaaaactctggcgtcgctgccgtcacaccgccctcgccctggatcggctcaaccaccaccgcacaggtgtgatcatccatcaccgctttcactgcatggagatcgttaaagggaacgtggatgatgtctgccggtttcggcccaaagccgtcggaatattttggctgcccacccacgctaacggtaaacaggctgcgaccatgaaaagcgttatggaaggcaataattttggttttgaacgggctatgacgcacacaggcgtaatggcgtgccagtttaaaggcggtttcgttagcttccgtgccggagttcataaacaccacgcgttcggcaaacgttgcctcaatcagtttacgcccaagacgcagcgccggttcattggtgaaaacgttactgatatgccacagagtttcgccctgggtttttaacgcgttcaccagcgcaggatggcaatggcccaacgccgtaactgcaatgccacccgcgaaatcgacatactccttgccttgctgatcccagattcggctgccctgaccttttaccggaataaactctgccggagcataaatcggcaggatcacttcatcgaaagtcgcgcgtgtaattgctgtttgttcaattgccatctcatgatcaccctgttacgcataaacaaatgtgaaattataaccacaaaatatgcataaaaaatcactaaatggcaatcagaaatcagcgatgcaggaaattagccagcagttgatgtccttgttcgctaagaatactttctggatggaactgcacaccttccagatcccactggcgatggcgaatccccataatctctcgggtttcgctccaggccgtcacgtcaaagcacgctggtaaactgtcaggttccaccaccaggctatggtagcgtgtcacggtaagtggatttgccagcccccgaaatacgccctcaccgttatgtgtaatcgggctggttttgccgtgcatgacctttgcggcgcgcacaactttaccgccaaatgcctgcgccattgcctgatgaccgaggcagacgccaagaatcggcaagcgcccggcatagtggcgaataacgtcaagggagatcccggcttcatctggcgtacaggggccaggactgatgacaattttttgtggtttaagggcgtcgatatccgccagcgtcaacgcatcgttgcgcttaaccagcacatccgcccccagttcacaaaagtactggtagaggttccaggtaaaagaatcgtagttatctataagcaggatcatggcggctccggtacaaaagaaccgcgctattttactcagattccccggcttcgcttaccactttgctaaatatcatctgcagtgcggtgagatcccccattgccccactctgatttgcctgattccaggcctctttttcgataccctgccagctcagttgatatccggcatgaatcgccagttgctcgaagaagatccgctgtgccagaccacttcccacccggaagggatgcagcacgttgatttcacaatagtaatgcgccagccgctcgacgaacttcgctttctccaggccaaccagataaccttcttcctccagatcctgcatcagggcattgccctctttttcgatataagcaaagtggcagaacggcgtatcaccctgataaatatcaacttcacgcagttgccctgcccagtcgaaaatatcctgatacagctggcgatggatagttcgcaaatgcggtaaaccgcgcaccagcggaccaagctcaatggtcgcagcacgcagcgccgtcatttcgtaagcggcctgttccagccgctgctgctggcggatgttcagccggttacgcatgatatcaaggcctggataaagatacggatcgcgcccttcgccgaatttatcgctcatagtgactcctcagctcttcaaggcgcgctaaagcctctgcggcagtaagagtgactaaaggcatctcgacgccttcaagacggcgactggcctgaaaattacgattacgctgaagctcccagagacgggacttttgcttatcggtgagtttcttcacttgatgcctccctgaacgtgtccatttgccacaagtataagcggcaaatccgggttacgccgggagagcagaagcgcgggcaagattgcccgcgcgagaaatcattacggcaggactttagcggaaaggataactaccggtttactcggcacattctggtacggaccaacgtcatgagtcggcacctgggaaatcttatcggcaacgtccatgcctttcaccactttaccaaataccgcgtaaccgaaatcacgctgaccatggtcaaggaaggcgttatcggcaacgttgataaagaactggctggtggcgctgtctttgtcagcggtacgtgccatcgcgatggtgccacgcgtgttgcgcaggccgttatcggcttcatttttgattggcgggtttggttttttctgctgcatctgctcggtgaaaccgccgccctgaatcataaagccaggaatgacgcggtgaaaggtagtgttgttataaaaaccgctgttcacataatcgacaaagttttgcacagacactggcgctttttgtttatccagctccagttcgatgttaccagcactggttgtcaacaatacgtgcgggtcccctttcgctgccattgctgcgggagaaagagcagaaagagcgaaaacagcagccatcgccgccagggtgcttttgaacatgagatttccttaacaaacagagcagaaaaaaagcaagtgaagagattctaaatagccttcaagaacaaggccatccctttacctaattttacgtatctgaaatatatgtaacctgacgatcactttttattccgtgatcaaaatcacctcttaaaatgcaatttagcaaccgattgcaataaaacatttaaacagatcacaaaatcacctaaaatcgcccgctcgcggcatatcccgctatgccattttatttttgaacgcaggccaatcatgactaacagcaatcgcatcaagctcacatggattagctttctctcctacgcactgactggtgcgttggttattgtcaccgggatggtgatgggaaatatcgccgattatttcaatctgcctgtttccagtatgagtaataccttcaccttcctcaacgccggcattttaatctctatcttcctcaacgcctggctgatggaaatcgtcccgttgaaaacgcagttacgttttggctttctcctgatggtgctggcggttgccggtttgatgttcagccacagcctggcgctgttcagcgcggcgatgttcattctcggggtggtcagcggcatcaccatgagcattggtacattcctggtaacacaaatgtatgaagggcgtcagcgcggttcccgcctgttatttaccgactccttcttcagtatggctgggatgattttcccaatgatcgccgcgtttctactggcgcgcagcattgagtggtactgggtttatgcctgcatcgggctggtgtatgtcgctatttttattctgaccttcggctgtgagttcccggcgctgggcaaacatgcgccaaaaacggatgctccggtagagaaagaaaagtgggggatcggcgtactgtttctctctgttgcggcgttgtgctacatcctcggtcagttaggttttatctcctgggtgcctgagtatgccaaaggcctgggcatgagcctgaacgacgcgggcacgctggtgagtaacttctggatgagttacatggtcggcatgtgggcgttcagctttattcttcgcttctttgatttgcaacgcattctgaccgtactggctggtctggctgcgattctgatgtacgtctttaacaccggaacaccagcacatatggcgtggagtattctcgctctgggcttcttctccagcgcgatctataccaccatcatcaccctgggtagtcagcagaccaaagtaccgagcccaaaactggttaactttgtcctgacctgcggaaccatcggtactatgttgacctttgtggttaccggcccgatcgttgaacatagcggtccgcaggcggcactgcttacagcaaacggtctgtacgctgtcgtctttgtgatgtgcttcctgttaggtttcgtcagccgtcaccgtcagcataacaccctgacctctcattaattgctcatgccggacggcactatcgtcgtccggccttttcctctcttcccccgctacgtgcatctatttctataaacccgctcattttgtctattttttgcacaaacatgaaatatcagacaattccgtgacttaagaaaatttatacaaatcagcaatatacccattaaggagtatataaaggtgaatttgatttacatcaataagcggggttgctgaatcgttaaggtaggcggtaatagaaaagaaatcgaggcaaaaatgagcaaagtcagactcgcaattatcggtaacggtatggtcggccatcgctttatcgaagatcttcttgataaatctgatgcggccaactttgatattaccgttttctgtgaagaaccgcgcatcgcttatgaccgcgtacacctcagctcttacttctctcaccacaccgccgaagagctgagcctggtgcgcgaaggcttctacgagaaacacggcatcaaagttctggtcggcgaacgcgctatcaccatcaaccgtcaggagaaggtgattcactccagcgccggacgtaccgttttttatgacaagctgatcatggcaaccggttcctacccgtggatcccgccaatcaaaggttctgatactcaggactgctttgtctatcgcactattgaagacctcaacgccattgaatcctgcgcccgtcgcagcaaacgcggtgccgttgttggtggcggcctgttaggtctggaagccgcaggcgcgctgaaaaacttaggtattgaaacccacgttatcgaatttgcccctatgctgatggcagaacagcttgatcagatgggcggcgagcagctgcgtcgcaaaatcgaaagtatgggcgtgcgcgttcacaccagcaaaaacacccttgagattgtgcaggaaggtgttgaagcgcgtaaaaccatgcgttttgccgacggcagcgaactggaagtcgactttatcgtcttctctaccggtatccgtccgcgcgataagctggcaacccagtgtggtctggacgttgctccgcgtgggggtattgtcattaatgattcctgccagacttccgatccggatatctacgccatcggtgaatgcgcaagctggaacaaccgtgtatttggtctggtagcacctggctacaaaatggcgcaggtcgccgttgaccatattctcggtagcgaaaacgcctttgaaggtgctgaccttagcgccaagctgaaactgctgggcgtagacgtaggcggtattggtgatgcgcacggtcgcacgcctggcgcacgtagctacgtttacctcgacgaaagtaaagagatctacaaacgcctgattgtcagcgaagacaacaaaaccctgctcggtgcggtactggtgggcgataccagcgactacggtaacctgctgcaactggtgctgaacgctatcgaactgccggaaaacccggattccctgatcctgccagcacacagcggtagcggcaagccgtctatcggtgttgataaactgccggacagcgcgcaaatctgctcctgcttcgacgtcaccaaaggtgatctgattgctgccatcaacaaaggctgccacacagttgcggcgctgaaagctgaaaccaaagcgggtactggctgcggtggctgtatcccgctggtcactcaggtactgaacgcggaactggcgaaacagggcatcgaagttaacaacaacctgtgcgaacactttgcttatagccgtcaggaactgttccatttgatccgcgttgaaggcattaaaaccttcgaagaactgctggcgaaacacggcaaaggctacggttgtgaagtttgtaaaccaaccgtcggtagcctgctggcctcctgctggaacgaatacattctgaagccggaacatactccgctgcaggattctaacgacaacttcctcgctaacatccagaaagacggcacctacagcgtgatcccgcgttctccgggcggtgaaatcaccccggaagggctgatggcggtaggtcgtatcgcgcgtgaatttaatctctacaccaagatcactggctcccagcgtctggcgatgtttggcgcacagaaagacgatctgccggagatctggcgtcagctgattgaagccggcttcgaaaccggtcatgcctatgcgaaagcactgcgtatggcgaaaacctgcgtgggtagcacctggtgccgctacggcgttggcgacagcgtcggcctcggcgtggaactggaaaaccgctacaaaggcatccgtacgccgcacaaaatgaagttcggtgtctccggctgtacccgtgaatgtagtgaagctcagggtaaagacgtgggtattatcgccactgaaaaaggctggaacctgtatgtttgcggtaacggcggcatgaaaccgcgtcatgcggatctgctggcggcggatatcgatcgcgaaacgctgatcaaatatctcgaccgcttcatgatgttctacatccgtactgccgacaaactgacgcgtaccgcaccgtggttagaaaacctcgaaggcggcatcgattacctgaaagcagtgatcattgacgacaaactggggctgaacgcacatctggaagaagagatggcgcgcctgcgtgaagcggtactgtgtgagtggactgaaacggtcaatacgccgtctgcgcagactcgcttcaaacacttcatcaacagcgacaagcgtgacccgaacgtgcagatggtgccagagcgcgaacagcaccgtccggcaacgccgtatgaacgtatcccagtaactctggtggaggacaacgcatgagccagtggaaagacatctgcaaaatcgatgacatcctgcctgaaaccggcgtctgcgcgctgttaggtgacgagcaggtcgcgattttccgcccgtatcacagcgatcaggtgtttgcgatcagcaacatcgacccgttcttcgagtccagcgtgctgagtcgcggactgattgcggaacaccagggcgagctgtgggtcgccagcccgctgaaaaaacagcgttttcgcttaagcgacggcttgtgcatggaagacgaacagttttccgtcaaacattacgaagcgcgagtgaaagacggcgtggtgcagctgcgcggttaatgttttaacgggaggcgcaatgcctcccctttttgcatggtcctgtaataatcttcggtatattgcaggacattttttaaactttttgttttattttttgtttttattttttaaaggataatcaaatgtttacagacactattaataagtgtgcggctaacgctgcgcgcattgcacgcctgagcgcaaataacccgctcggcttttgggtcagctccgccatggcgggcgcgtatgtgggtcttgggatcatcctgattttcacgctcggtaatttgctcgatccatccgtacgccctttggtgatgggcgcgacctttggtatcgccttaacgctggtgattatcgccggttctgaactgttcaccggacacaccatgttcctcacctttggggtaaaagcgggcagcatcagccacgggcaaatgtgggcaatcctgccgcaaacctggctgggtaacctggtcggttccgtcttcgttgccatgctctatagctggggcggcggtagcctgctgccggtagataccagcatcgttcactccgtcgcgctggctaaaaccactgcaccggcaatggtactcttcttcaaaggtgcattgtgtaactggctggtttgcctggcaatctggatggcgctgcgcactgaaggggcggcgaaatttatcgctatctggtggtgtctgctggcatttatcgcgtccggctacgagcactctatcgctaacatgacgctgttcgcgctctcctggttcggcaaccacagcgaagcctacacgctggcgggtattggtcataacctgctgtgggtgacgctgggtaatactttaagtggtgccgtattcatgggattgggttattggtatgctacgccgaaagcgaatcgtccggttgcggacaaatttaatcaaactgaaacggctgccggttaattactaaggggtttttacgtggatcatttgcctatattttgccaattacgcgatcgcgactgtctgattgtcggcggtggtgatgtcgcggaacgcaaagcaaggttgctgttagacgcaggcgctcgcttaacggtgaatgcattagcgtttattccacagttcaccgcatgggcagatgcaggcatgttaaccctcgtcgaagggccatttgatgaaagccttctcgacacctgctggctggcgattgcagcgacggatgatgacgcgcttaaccagcgcgtcagcgaagccgctgaagctcgtcgcatcttctgtaacgtggtcgatgcgccgaaagccgccagctttattatgccgagcattattgaccgcagtccgctcatggtagcggtctcctctggcggcacctctccggttctggcacgcctgttgcgcgaaaaacttgaaagtctgctgccgttacatctgggccaggtagcgaaatacgccgggcaattacgcgggcgagtgaaacaacagttcgccacgatgggtgagcgtcgccgtttctgggagaaattgttcgttaacgaccgcctggcgcagagcctggcaaacaacgatcagaaagccattactgaaacgaccgaacagttaatcaacgaaccgctcgaccatcgcggtgaagtggtgctggttggtgcaggtccgggcgatgccgggctgctgacactgaaaggactgcaacaaattcagcaggcagatgtggtggtctacgaccgtctggtttctgacgatattatgaatctggtacgccgcgatgcggaccgtgttttcgtcggcaaacgcgcgggataccactgcgtaccccaggaagagattaaccagatcctgctgcgggaagcgcaaaaaggcaaacgcgtggtgcggctgaaaggtggcgatccgtttatttttggccgtggtggcgaagagctggaaacactgtgcaacgcgggtattccgttcagcgtggttccgggtattaccgcagcttctggttgctctgcctatagcggtattccactcacgcatcgcgattatgcccagagcgtacgcttaattaccggacacttaaaaaccggtggcgagctggactgggaaaacctggcggcagaaaaacagacgctggtgttctatatggggttgaatcaggccgcgactattcagcaaaagctgattgaacacggaatgccaggcgaaatgccggtggcaattgtcgaaaacggtacggcagtcacgcagcgcgtgattgacggtacgctcacacagctgggagaactggcgcagcaaatgaacagtccaagcctaattattattggtcgggttgttggcctgcgcgataaactgaactggttctccaaccattaatttaacccgggccagagaattctggccttcttaatgactctttttatatattcagcaaataaaacatagccccttaataaatattatctgctaatgggttatattcaccgttacagcgacttacaaaattaagtcattcgctcactgacgccaattaaatattcctgtatcgttcttaacgagcagtctgcttatattcatataatcaatgaatattaattaatatataatacatagggaatgtaaatgaacaaatttattaaagttgcactggtaggtgcagtactggctacgttaactgcatgtactggtcatattgaaaaccgtgataagaactgctcttacgactacctgctgcacccggcaatttctatttctaaaatcattggcggttgcggtcctactgcacagtaagtctctgacagaaatcggctaacaccggtttaattgcccgacgccctctggattttccgagggcgtatttgtttctatgtccttcttgcccccgcccgtaaaaatattttcactttaaattcaatttgataactacatccattagccacagcgcgatcctgtgcgaaattttgtgatcttcctccacattacataacatcatatgttgttatattcatcatgcattgtcatgttaccttttaaatgactgcaaactctcccctacaacgtattggacaagaaaaaggtatcgctatgggaagccaggaactccaacgcaagctcggattttgggccgttcttgcaatcgccgtcgggacaaccgtcggctccggtatttttgtatctgtgggtgaagtggcaaaagcagcgggcacgccgtggcttacggtgctcgcgtttgtcattggcgggttaattgtgatcccgcaaatgtgcgtctatgcggaactatccaccgcttatccggaaaatggcgcagattatgtttatctgaaaaatgccggaagccgaccgctggctttcctctccggctgggccagcttctgggccaacgatgcgccgagtttgagcattatggcgctggcgattgtcagcaatcttggctttttaacgcctatcgatccgttgctcggtaaatttatcgccgccggattaattatcgcctttatgttgctacacctgcgctccgttgaaggcggcgcagcgtttcagacgctaattaccatcgccaaaattatcccgttcactatcgtcattggccttgggatcttctggtttaaagcggagaattttgccgcccctaccaccactgcgattggcgcaacgggcagctttatggcgctgctggcggggatctctgccaccagttggagctataccggcatggcctctatctgttatatgaccggcgaaattaaaaaccccggaaaaaccatgccacgagcgctgattggttcctgtctgctggttctggtgctctacaccctgctggcgctggtgatttccggcctgatgcccttcgacaaactcgccaattctgaaacgccgatttccgacgccctgacctggatccccgcactcggcagcaccgctgggatctttgttgccatcacggcgatgatcgtcattcttggtagcctttccagctgcgtgatgtaccagccgcggctggaatacgcgatggcgaaagacaacctgttctttaaatgcttcggccatgtgcatccgaaatacaacacgccggatgtctccatcatcctgcaaggggcgctggggatcttcttcatcttcgtttccgatctcaccagcctgctgggttatttcaccctggtgatgtgtttcaaaaataccctcaccttcggctccatcatctggtgtcgtaaacgcgacgattacaaaccgctgtggcgtactccggctttcgggctgatgaccaccctcgccattgcgagtagcctcattctggtcgccagtacctttgtctgggcaccgattcccggccttatctgcgccgtcatcgttattgctactggtctgcctgcttacgccttctgggcgaagcgtagccgccagctcaacgctttgagctaatgttatctggagaaaataaaatgttggatattgataaaagcaccgtggactttctggtcaccgaaaatatggttcaggaagtggaaaaagttctcagccatgacgttccgctggtgcacgccatcgtggaagagatggtgaagcgcgacattgatcgtatttatttcgttgcctgcggaagcccactcaacgcggcgcaaacggcgaaacatctggcggatcgcttttccgatcttcaggtctacgccatttccggctgggagttctgcgataacaccccgtatcgcctcgacgatcgttgcgcagtaattggcgtttctgactacggtaaaaccgaagaggtaatcaaagcgctggagctgggccgggcctgcggcgcactcactgcggcgttcaccaaacgcgcggatagcccgattaccagcgcggcggaatttagcattgattatcaggccgactgtatctgggaaattcacctgctgctctgctacagcgtggtgctggagatgatcacccgcctcgcgccgaacgcggaaatcggcaagatcaaaaacgatctcaagcagttgccgaatgcgctcggtcatctggtacgcacctgggaagaaaaaggccgccagcttggtgaactggccagccagtggccgatgatttataccgttgctgcgggtccgctgcgtccgctgggttacaaagaaggcattgtaacgctgatggaatttacctggacgcacggctgcgtgattgagagcggagagttccgccatggcccgctggagattgtcgaaccgggcgttccgttcctgttcctgctcggcaatgatgaaagtcgccacaccaccgaacgcgccattaactttgttaaacagcgtactgacaacgtgatcgtcatcgattacgccgaaattagccaagggctgcacccgtggctggcaccgttcctgatgttcgtgccaatggagtggctctgctactacctgtctatttacaaagatcacaacccggatgaacgccgctattacggtggtctggtggaatattaatccctctcccggcccggcaacgggccggatttacgcaaggagttacccgatgaaaacaggtatgtttacctgcggccaccagcggctgcctattgaacacgcatttcgtgatgcaagcgagctgggttacgacggcatcgaaatttggggcggtcgcccgcacgcgttcgcgccggacttaaaagcgggcggcatcaaacaaatcaaggcgctggcgcagacgtatcagatgccgattatcggctatacgccagaaaccaacggctatccgtataacatgatgctgggcgatgaacatatgcgtcgcgaaagcctcgacatgatcaagctggcgatggatatggcaaaagagatgaacgcgggttatacgctgatttccgcggcccacgcgggctatctcacgccacctaatgttatctggggacggctggcagagaacctaagcgaactgtgtgagtacgcggaaaacatcggcatggatctaatcctcgaaccgttaacgccgtatgaaagcaacgtcgtgtgtaatgctaatgatgtgcttcatgcgctggcgctggtgcctagcccgcgcctgttcagcatggtcgacatttgcgcgccgtatgtccaggcggaaccggtgatgagttatttcgacaaactgggcgataaattacgtcatctgcatattgtcgacagcgacggggccagcgacacgcattacattcctggagaaggcaaaatgccgctgcgggaactgatgcgcgatattattgagcggggctatgagggttactgtacggtggagctggtgacgatgtatatgaacgagcccagactctatgcccgccaggcgctggaacgctttcgcgcgctgctgccggaggatgagagatgaaaaccctggcgacaatcggcgataactgcgtcgatatctacccgcaactgaataaagcgttttctggcggtaatgcggtcaatgtggcggtgtactgcactcgctacggcatacagccgggatgcattacctgggtgggtgacgatgactacggcacaaagctgaagcaggatctcgcccgcatgggcgtcgatatcagccatgtccatacgaaacacggcgttaccgcacaaactcaggtggaactgcacgacaatgatcgcgtttttggcgactacaccgaaggcgtgatggccgactttgccctgagtgaagaggattacgcctggctggcgcagtatgacattgtgcacgcggcaatctggggacatgcggaagacgcattcccacagctgcacgctgcgggcaaacttaccgctttcgacttctccgacaagtgggacagcccgctctggcagacactggtgccgcatctcgattttgcctttgcctccgcaccgcaagaagacgaaacgctgcgtctgaagatgaaagcgattgttgcccgtggcgcaggaacagtgattgtcacgctgggtgaaaacggcagcattgcctgggatggcgcgcagttctggcgtcaggctcctgaaccggtgacggttatcgacaccatgggtgccggagatagcttcattgccggattcctttgcggctggtctgcggggatgacattaccgcaggcgatagcgcagggaacggcgtgcgcggcgaaaaccattcagtaccacggtgcctggtaagtataacgttggcgtgagcatcttcacgccaacgtgctgttacttgccggaaaacgaccctataatccgagtaattcattctttatttcagggtcgattatgagtgctacggaccgctactctcatcaactcctctacgctaccgtccgccagcgactgctggatgatatcgcgcagggggtttaccaggccgggcaacagatccctaccgaaaacgagctttgtacacaatataacgtcagccgcattaccattcgcaaagccatcagcgacttagtggcagacggcgtactgatccgctggcagggaaaaggcacctttgtacaaagccagaaagttgaaaacgccctgcttactgtcagtggttttaccgattttggcgtcagtcaaggcaaggcgacgaaagagaaagtgatcgaacaggaacgggtcagcgccgcgccgttttgcgaaaagctgaacatccccggaaacagcgaagtgttccatctctgccgggtgatgtatctcgataaagagccgctgtttattgatagtagttggatcccgctgagccgttatcctgactttgatgagatttacgtcgaaggaagctccacctatcagttatttcaggagcgttttgacacgcgagtggtcagcgacaaaaagaccatcgatatctttgccgccacccgcccgcaggcaaaatggctgaaatgcgaactgggcgaaccgttgtttcgcatcagcaaaatcgcctttgatcagaatgacaaaccggtgcacgtctccgaactcttctgccgcgccaatcgcatcaccttaactattgataataaaagacattaaccgtaggccggataagatgcgccagcatcgcatccggcgatgctggcgcgttgaattttacatcccgtacgttcccctcaccctaaccctctccccaaaggggcgaggggaccgttcagtacggaatttagcttgacggtgctatccagcattaaatactggcaatactctcacgcaaaatccgcagcaccgtctcttcaccgctgcgattcgggttaatgcgaatcgcacaatgttcactttgtggattcgcctggcgaaacgttccggaaaggcgataaaagagcggcgggatttcatatttgctctctgcacccaccgggtaaggcaaggcaccgcgcttttgcgcctcttccagcactctggcggcaatcggctgatgaaactcgacaatcaacaccttgctctgcgcattagcaatcaccgcgcttttcacttccggcaccgcaccaccgttaagcaaagccagcaaccgttcagatacccctgcctgcaccgcgtgcatcactggcgcaaacaccagaccacgcaatacttccagcgcctgtgcgccctggatctggctaccgccggagtaaagcgtggcgcgaatacggttgataacatcagcatcgccgaccactgcaccaacaccctctggcccaaatagcttgaagcaggaaaatgtgctgacattcgcgccgcattcacagccgattcgagccaccttcatcaccgcatagttgtcatcggttaacgctggaacacctgccgcgcgcaacgttgccagcacatctgccagcacgtagctgtcctgcggctgctggcgcgtatgctgcaccagcgccgcatccggttgttgctcgtcgacgacctgcttcagtgcgctcaggtcattgaaatcaacagtaataagcgtcagccccatctgctcaataataacccgtgtcgtcgggtaaacaggcgcgtcatgcaccagaagacgctgccccggtttgagcaaagccgccagcccggcgcgaatcgcgccagtccccgcgccctgcaccagcgccgcagcctgtgcgtgaaatgcatcagccagcacctgttccacacgctgggtaacgcgcggttgattcagtcctggcgttaagcctaaatcaccgccagtaagaaactcgctgccggggaaatggcgacaaatgctatccaccagcgcaaactgcttttgctgcgcctcaataatcgtcaggctttgcagaggaaacgtcttcataggtgccttccttaagccggaacgaacaggccaagccagtaaagaacattcagcagaataccggtgatcattactgccacgaccggtgccgccattttctgtaccggacggcccagggattcgttgaggaagtaaatggcaaccgcgatagagaatccggtataacccgccatcttaattgctgcgaaaatgctaccgaccagcagcgccacttccatcagcatattcatggcgttacggatgttatcgctcgcattacgcacgctcgggtagcgtcccagccatttgccgatgctacgaagcagcaagacttccgcgctaataaccactgcgcctaataccgctgcaaccatcggattcgggctgagatagtccaccgcataaacaaaggtaaagcccgcaactgcatacacacccgttgctaacgcggtggtggcaatcaacggcacaaaccccagtccgcgcataaattctgccagagccgcctgattaatcagcgtttggctttgttccggcgttacgcctgcggaatatgctttctccagtgtgaagatgctcacttcactgccagcaaaaatcttcatgctggcaacggcggcaatcaatgctcccacgatggcgatatagggtaagtttttgataatccgactcgtgcgttcttcaaacacgctaagcccgctggcatcaatgtcattttcatcacgatgacgcaggtcgtgagttatcgcgatccccagcagcatcaccatgccaataaagatttcgatggattcagggttaagatgtgggaaatagcgcacgactaccacacgggtcatcagtaccaccacggcggcgatcagactttgcttccagccaaactggtagaaaatcgccaccagcgggaacagtgcaaaagcactaaccaccgggctgcttaattcccccaggctacctaatacatccaccggcagcgcggtcagcagctggtttactggcaacaggcaagtaaggatcaacacgccccagatagcgccaagaccaaacgccatcaggctgtttatcgccaggacgccgaggatatcggtaggaagaaagagtaaccatgcgttgagcagcccggttttcagggtaaaagagatccccacgctggccacaaaaccaatgctcagaccaaaagcgatactccccgcctcgcgacggttcatatagccttcaatcagttgcggcaggatcgggcggatgccgtcatgaaaaacagccgcgctgcgatgcgccagaaggcttgtcatacccgtcaggcacgccaccacgataatctgaatatacagatccatagtcgtgccttttatttcagatggttaatcagcatcggaatcgcgtgttcgacgtgctcaacggaaaggccaaacgccacttttccttcagcgatcattttggcgatatgctcgtctttcgctttaatgcctggtttggcaatggtgcaacttttgttatagcctatcaccgcgatggcaatgctcaatgccgcgcccgcaccggtattacacgcgccgatgtaataatccagttgcccggatttcaccttcattgccgcttccatgtcgttgtgaatgaaaacttcaaaacagccaggagccgtcgcttcaatagtttttttaatctgctcacgctgtaagcctgcaacgccaatctttttcatgagtctgtccttattggaaaaattgagagggattttcacgtaacatcacatccacatcggcctgactgaatccactctggcgcaattgcggaataaaggtggttagtaaatagtcatagccataaccaccgttggcttttaaatgggagcggcgcgtaatatccatgctcagcatgacgcggttcagcaacccacggtcgcgtagcgcatgaagcatcgcaatacgcttttcgtccgggtagtaactgttcttgccgatggtgtcgaactgcacgtacgcgccgagatcgatcatcttcaaaatgttgtcgaggttgtctttcagatcgcagtgaccaacggtgacgcggctaagatcaaccccgtgggcttgtagcaacgccagttgctccagccccatcgtgctgaagctcgtatgcgtggagatcgggcgtccggtctggttatgcgccagcgcagcggcaataaataccttctcttccagcggcgtaatctttccttcgctggtgccgatctccgcgatgatcccggctttcagctccgtgccatcgataccctgttcaatttcatcgaccatctcctgcgccagttcctgcacgctgcgggtcgccacatgttccgggaaaaacgcgtcctggtaataaccggtacaggccaccacgttgatccccgtctcgcgcattacatcaagcataaattgcgcattgcgccccatgtaacggttggtcatctcaatcacattacgcacgccccgggtcatcaggtcgttcatctcctggcaaatgaacgcatactgatcaaggcggcagtccacgttgtttttaaagccggagagatcaatatgcagatgctcatgggcgagggtgtaacccgtcggatcaaaactcatagggtgtctcctgcaaaccggagggaggaaagaaaagagcgaccattttgtggcggtggcgcgcggaaaaattcacacacggtagcccccacatcagaaagcgtggtgcgcacaccgagctgcgtagcgatcatcccttgctgataaaccagcactggcaccacttcgcgggtatggtggctgtgaccaatggtcggatcgttgccgtgatccgccatcacgaccaggcaatcatctggctgcatcgcctcaacaagccgggcaaggttacggtcaacgacctgcaaacgttcggcataacgtgcgacgtcttctgcatgaccagcgaggtcggtttcctgaatgttggtgcaaataaacgccgtcggatgggtgttaaattcgttgagggtgatatccataatccgctggctatccaccagattttgccagctcacgccataaggattgttgacgatatctgccaccttacccaccagcacggttggcacgcctgcttcatacagtttttgtggcacctgcactttttcatcgacgccatagcccatatgcacgacctggaaaccgttgtcataagcgccagaacgcggcgcattgataccaataaagcgcccttctttgctttctgcggcatcgagaatgcgttgactgtcggttaacaggccaccaaatgtaatgacccgaccgacctgtacctgctcacgcacgatacgaccaattttgattgcgtcgtcaaaagagatcacagagagattggcggtaatgttatagacctggcctaaatccgcctcgagattatcgccaatcgcaaccgcctgattgacccacagaaattgcagatcatcgccacggcgctccacctgccagccagcggaaactaatgcctgctcaacacggtcaatcacatcgcgaaaaggcatccgcagcggcggtaacgggcgcgtgcctaaaatttcctgatgccccataaaggtatcgccaccttcatgttgcagctctgccacgccccaggttgcggaatcactcggctgcatatcgcctggcgcataacccaatgcgttgattagccccagcgtctccagcgttggtagctgcaaatgcggcaactggctcaggatgtgaccacatgtattcgctcccgcatcttgcggacgcaccagcgtgacatctttcattgcccctacgccaaagctatcaatcactaacaccacaaatcgcgccattacgcccccagagagtttccaagactgtcataacgaccgacgatttccggttcgccacgatgaataccggacaccagcaccacatcgctacgggtgacaaaaatctgcgtgcgaaaacagagcaccactgcactgcttaccggaaactcgcctgccagcggcagggtgtagtcgatactgctgtcatccacagttttgagattggtttcagtaatcttttgattttctggcgtaaacaccaacgcatgttgcgcatgaccacgacgatagtaaccgccgccgtagcagtagctgtcgccacggaaatgatgggagatttcacttaaccagagcatcgcgatacgttcaggctgatcgccctgctggtttgccggaatagtgcccgtcagcgcatgaccgggttcggcatgagtcacaccgtattgcgccagtaatggcaggctagtgcagctggtcgcactaggcgcgttcagttgctcaagtgcaataccagatttcgccagttgatcccgtgcctgtatcagcgtgtgaagattcggtgtcggcaaaacttttccgacagcctcatcccaaagcaggcaagggaaatgggtaagtccggctaaatgcagccctggcagattctggatttcggcgacaatctccggcaacaccttgagggcaaaaccgctctcctggcccggataaagaaaatcatcgtcgctataaactttaagcagcacagactggattcgcccggccttcaccgccgccgcagaaacttcccgcgctttgtcgagagtaaacacggtgatgacgtcggtgccctgttcaacggcgtcagcaacctgatgacaagggatttgtaccagatgcccctgatgcgccacaggcaaaccagcgcggcgcatgactcgcgcctctttgtaatccaccgccacaatgccgctgtagcctaatgccagcaatttttccgccagccacggattacgaccaaactgcttggtcatcagatacagttcaatgccgtaaagccgcgccgtctcaatcagccgcttaccgttttccagtatctgatccacgtcgatcacccagctgtccggggcgatcttgccctgctgccacaggcttagtgcggcggaaatcagcgccgggttctggcgtttcaatgcttctacaaacatcttgttgcctcgtttctgttccttgaattaaatattcatttttttgaatatttaggttgtgcgacgtggatttgtcgggagcttcaaacctcttcgttagcagccatccataatccataaaggttggccagcaaatagccttcttcacacgggttaacttccagtgcgaattccttcaacaacacctgatgcaattgcacaacggcttgccagtggctggattgcgccagttctgccagcaactcgttatccagcggctctatttcttcaccacggcgactgcgcatcagtgcactcgccatatgtgtcatcgccatcgttccttgctcactgcgcaccggcagatggcactctgtttccagtacgttgacgacctgcatcatgcctttgcagatgtccttatcaataacgcctgcctcgcaaagcaggttgagtctggtttccatatcagatgcctttcgtttaataactcggttcctgttccccactcactacccgttgttgatgggcgagcagggcgtgtttatctacaacggcacgcagcagttgttgcattgggtaatcatcgactcgcgtcaggaccacggcttcggtggcctgtaaaaatcgcggatcgtctgtgagcggcgtcgcctctaatcccagcatggtcagttcgttttccgccaccacgttccagatcaccgcatcgacatcgcctttaacaatgcgttgtaaactctcgtgataagagagatcgactcgttccacatcactaccgccaaaaaaaacatcggtcatgattttctgatccgcgctacggttatccagccccacgcgcttcacgtttgcggactcgcctttacggcaaatcaactggtgctcgccaacgtaggtgtgcggccccaactccagcgcgaggcataagcctttttgcgtgagataactttccgccgctagtcggctaaccaccgccatgtcatacacgccattaagcagacactccacgcgaatatccgcgccacgcatgtgcgcatagtaaaaaggaatgccatcaaactgggctttcaatccgctcgccaggccttcgtacaaacgggtatagggcaagggcattgcacataccacgttgttgatatccacatgagtcagcaatgctttgttatccatctcgaccagataactgccattgcgcccacggcgttcaatccgtatcgctccgctactttccagcgttttcaacgcggcctgcgtcaggccaacggaactacggcattcatttgccagctcatctatggttttcaatcgattaccgcacttttcacccaacaaataacgggccagcgtcgtgatgacgacgccttcttttttgataaacgttcgacgcataataaattttcagtaaattgaatatttatatcttcaggaatttgaagataaggcgcaacagcgagatgtggaaacggcgaggcacttcacattttttcggattattgcaaatgaggataaaaaaaccgggtttccccggtttcagagtgatgataaaagcaaaattgcctgatgcgctacgcttatcaggcctacatttccttgcaatatgtgcattactttgtaggccggataaggcgttcacgccgcatccggcatgaacaaagcgcaatttgccagcaatagtgaattacggcttcgccacaaaaccaatcgcttcgtacaccgcttttagcgtacgggaagcgtgcgcgctggctttttccgcgccatctttcatcacctgttgcaggaaggcttcatcgttgcggaaacggtgatagcgttcctgcaattcagtcagcataccggaaacggcatcagccacttcacctttcagatgaccatacatcttgccttcgaactgtttttccagttctgggatgctctggcccgttaccgcactaaggatatccaacaggttggaaacgcccgctttgttctgcacatcgtagcgaactaccggcggctcgtcggagtcagtgaccgcacgtttgattttcttcactacgcttttcgggtcttccagcaggccgataacgttattgcgattatcgtcagacttggacatcttcttggtcggctccagcaggctcattacgcgcgcgccagatttcggaataaacggctccggcaccttaaagatctcgccatacagcgcgttgaaacgctgggcaatatcgcggctcagttcgaggtgctgtttctggtcttcacccaccggtaccagattagtttgatacagcaggatgtccgctgccatcagcaccggatagtcaaacagaccagcgttgatgttctcggcataacgcgcagatttatctttaaactgcgtcatgcgactcagttcgccgaagtaggtatagcagttcagtgcccagcctaactgtgcatgttccggcacgtgggactgaacaaaaatggtgcttttctcaggatcgataccacaagccagatacaaggccagcgtatccagcgtcgctttacgcagcttctgtgcatcctggcgcacggtgatcgcgtgttggtcaacgatacagtaaatgcaatggtagtcatcctgcatgtttacccactgacgcagcgcacccatgtagttaccaatggtcaattcaccactgggctgtgcgccactaaaaacgatgggcttagtcatttttgctttcctgattttcgctatgcggaagccctaatgcgggcagaaggtcatttatagactgataaattacatcaggctggctgagatcgatagcctcgccgtagttatatccgtaggttaagccaacacttgggcaacctgccgcttttgccgcctgaatatcattgcgactgtcgccgacaaacagcatctgttgtggggcaattcccatccgctcagccaccagtaacagcgggtccggatgcggttttttgttttgcacatcatcaccaccaatcaccacgctgaagtatttggcgatatctaaggcttcgagcagcggcgcgacgaacggcgtcggtttgttggtgaccaggcctagcggcaggcctttagcctgcaacgcgcccaacgtatcggcaacgtgcgggaacaaaaacgtcccctcttcggcaacctcgccatagtagcgatcgaacagtttacgcagaatacgtacctgttcttctgccggaatgtcgtcatcaacgggcggtttacccattgttttacgctgagtcgcacgttcctgacgcgcccaggtcaatgcgcgctccatcagaacatctgcgccgttaccaatccaggtaataacgcgttcttcacctgcgacgggcaactccagcgcatacagcgccatatctaccgcagcagcaagaccaggagcactgtcgaccagcgtaccatcaagatcaaaagcgacgccgcgaatatcttcaaacttattcatgacttacctttgccagttcactgcgcatttcatcaatgacttttttgtagtctggctggtcgaagattgcgctaccggcgacgaacatatccgcgcccgccgcagcgatttcgccaatgttgttcaccttcacgccaccgtccacttctagtcgaatgtcaaagccagactcgtcgatacggcgacgtacttcgcgcagtttatccagtgtttgaggaatgaaagactgaccgccgaaaccagggttgacggacatcagcaggatcacatccagcttatccatcacgtaatccagatagctcagaggtgtcgccgggttaaataccagacccgctttacagccattttctttaatcagttgcagcgtgcggtcaacatgctcggaggcttctggatgaaaggtaatgatgctggcaccagcggcagcgaaatcaggcacaatgcgatcgacgggtttcaccatcaggtgtacgtcgataggggcggtaatgccatagttacgcaaggatttcagcaccattggcccaatcgtcagattgggaacatagtggttatccatgacgtcaaaatgcacgacatcagcgccagctgccagggcttttgcggtatcttcacccaggcgggcaaaatcagcgctcagaatactgggggcaatcaaatactgtttcatccgcttctccttgagaattattttttcgcgggactaacgactcctggtttgtacaaagccagcagttcgtccacctttttacgtgtgccgccgttgctgcttatactgcgtcgaactttgacgacatgcaattttgcgcgctgataccactcacgcgttaacatcgtatcgtgattggagatcagcactggaatatggcgctcaaccagaccttcggcgatctccgccagatgcgcttgttgttcaagcgtaaaactgtttgtgtgatacgccgtaaagttggcggtcgcagacagcggtgcataaggcggatcgcaatagacgacggatgcatcatctgcgcgcgccatgctatcggcgtaagactcacaatagaaaaaggcattctgcgctttttcagcgaagtgatacaactctgcttccgggaaatagggttttttgtagcggccgaacggcacgttaaactcaccgcgcagattgtaacgacacaggccgttgtaaccgtagcggttcaaatataaaaacagtaccgcccgacggaacggatcctggcttttgttgaactcttcgcggaactgatagtaaacctcggcgcaatttgtttcgggaacaaacagctcgcgtgcggcctgtacgtactcatcagtacgcatcttcacaatgttatagagactgatcaggtcgctattgatatcggcaaggatataacgagaaaagtcggtgttgagaaacacgctcccggcacctacaaaaggctcaaccagacattcgcccttgggcaaatgccgtttaatatcatcaagcaggggatacttgccccctgcccacttcaaaaaagcgcgatttttcttcatgctgactaactaattacaccttctccggctgtggagaaagctccgacagcatccagcgcttcaggcaactcccgcaacgataaaccattgcgggagataaccttgattacttcagatcggcctgtacctgacgcagcggtttcgcccacgggtttttggcctggacatctgctggcaatgtagataccgcttttttcgcctcttctttgctagcgtacacgccagaaaccaggacataccacggctgaccattacgcgtcgtttcatagacaacgtagtttttcagattctctttcttcgcccaaccgttcaggttgtcgtagttagaggaactgctcagctgcagagtgtaatggctggacggtgcgcttttcaagctaccaacattacctgcggtcttcgccccagcagcgggtgttgctgtggtttgcgccggggatgccgtctgtactggagccgtagtcgccgtctcttttggtgctggcgtagaagtcgcagccggtgccttcgtgctcgccacaggggcagctggttcagtacgcttcggcgtctgtgctaccggcttcggctccgttttcacggttgcttgcggttttttcggttcaatcaccgcctgctgacgagctgggcgcgtagtggacggacgttcagcggtttgcgttttcgccgtgtcacggcttgcattgccattgcgaacaggcgcaaccgttgcgggttcagtcggcaacgtggaattgaccgccacattgttcagctgttgctgattttgtggctgggtcagcgcattgttcaggtcaccctgcacttcaacacgttgttgaccatccgttgccaccggggtttgcccttgagtcggcgtagaagagatcggtggcagagaaacatcctgctgagtattttccgcagacgtggttcccggcgctggctgcacgccattcgcctgatcggtcgcattgccagcaagatcaatactcttctcgccagacgcggtttgatcgctggaagtggtgctgggggcttttagcgcagaaccgataccgatgatcaacagcagtagaaccagaatgccgacgcccatcatcatatactgacgagaagcgggtttactggctgcttttttgcgcttacgcggacgacgctctacgcgctcttcatccacggtttcatcttcggattcgtcaatttcttcttcgatttccggttcctcattgcgctctttttgcgcacgagtcggacggcgatcgtcagtgtcatcaagttcaatatcatcaaaattgatctgcggttcgccacgttcagtacgctcagaacgttcagaagattgacgagaacgaccagtacgacgatcgctgggatcgggtttcagctcgtcttctggtttgaattcatccatttaacaccccactaaaaggttaatgcttaccacgttgcaattaacctgaagctaatagaccgcttgataagcggcctgacctttcttgttgttacgcactttgacaatcggcaatggcgttaagaacaagctcgtggctaacgccgctgcgaacttcactcttaccaattgccaacggaagaattaagcgcatctctcccgcaaggactttcttgtcacgcagcatatgcggtaaatacgcctgcgcggacatttcgcgcggcccattgaccggtaacccagcccgcttgagcagggttataatacgctgcgtttcggcagaactaaactgcccgagacgttcgctcgtccgcgccgccatcaccatacccgcagcgaccgcttcaccatgtaaccaattgccataccccatttcagcttcaatggcatgaccaaaggtgtgtcccagattcagtaaagcacgtaacccggtttcgcgctcgtcggcggcgacaacttctgccttcagttcacaacaacggcgaatacagtacgccattgccggaccgtccagacgcaacaacgcatccagattctcttccagccagttaaaaaacgcaccgtcaagaataatgccgtatttgatgacttctgccagcccgctcgctaactcacgcgggggaagcgttttcagacagtcgagatccaccaccacactagcaggttggtagaacgcgccaatcatgtttttaccgaggggatggttgaccgcagttttgccgccaacggaggaatcgacctggctcagtaacgtcgtcgggacttgaatgaaacggacaccgcgctgataactcgccgccgcgaagccggtcagatcgcccactacgccgccgccaagcgccaccagcgtagtatcgcgaccatgcggtttttgtaacaacgccgtaaagacggtatcgagtacagccaggcttttatactgctcgccgtcagggaggataacgctatcgacgttaacacccgcctgttcaagtacgccgcggaccttatcgagatacagaggagccagggtttcgttggtgaccaacatgacctgctcgccgcttttcagcggtaagaaactagctggttcattaaacaaaccagatgcgatggtaattgggtaactacgttccccgagagtaacgacaatcctctccataacgcgacatccaccttaattactgtacccgcagacgagtgtatataaagccagaattagttgctttccagcatgtgaataatctggtttgcaaccactttagcgctttgatcatcagtacgaatggtcacgtcggcaatctcttcatacagcggattgcgttcattggccaacgcttccagaacttcacgcggcggtgtttcaacgtgcagcaacgggcgttttttatcacgctgcgtgcgtgcaagttgcttttcgatggtcgtttcaagataaacgacaacgccacgagcggaaagacggttacgcgtttcacgggatttcacagagccgccgccagtagccagcacaataccctgtttctcggtcaactcattgatgaccttttcttcgcgatcgcggaagccttcttcgccttctaaatcgaaaacccagcccacatcagctccggttcgtttctcaatctcttgatcggaatcgtaaaattccatattgagttgttgagctaactggcgcccaatagtgctttttccggcacccataggcccaaccagaaagatattgcgtttctctgccattttttcggtactactaagactattcgttaatgataaacccgcttcgctcagagagcgccgcaggacatgaactgaaacctcataagatattgcgagagtcagactgaaaattatctcaatactccagcgggtttggcaactgaataaatcacccatccctctgcatatctggtcgctgcaagcgcgctgccttgctaccaccgctctggcgataaatcaccgggtaagattagcgtaaaaaagacagcaaaatgccgcctgaatgataaatcatcatcatggaacgcaggcagcgaagagcaccaactctcaaatcggtactccttgtatgctaaatacctgcgcgcgtcaaatagatgaaacacgttcagcgtaaaaacattaccgcttttacggctgtttactcactggaaaccagtcgtggcgtgataaacaccactaactcgcgtcgttcatcttcttttccgtcatgacgaaataattgcccgaaccagggaatgtcgccaagcaacggtacgctatcctgaccgcttttatttttacgggtaaaaatgccgcccagcgccaacgtttctccgcttttgacctcgacctgcgtttcgatctcctgcttatcaatcgccagcacttcgccatcggcctgctgtagcacctgccccggaacgttctggctgatgtgtaatttcagccggatgcgacctttttgtaacaccgtgggcgtgacctccatccccaggacggcctctttaaattccacgctcgtcgcgccactttccccgctggaaacctgatatggaatttcgctcccctgtttaatgctggcaggctgaagatgactggccagcagacgcggactggcgataatatccagctgctgtttttgttcgagcgcggaaagctcaagatccagcaagcgtccgttgatgcgcccaatgttaaaaccgacatgcgttgtcgccgtcgctacggagaggtcgctaccaagcgtggtgacttgcccaacgccaccagcgtgttgcgcatcggccagcgtccatttcacgcctaactcacgcaaacttttttcattaatggtgacaatatgcgcgctcagctcaacctgcccgaccggcagatccatttgcgctacccactgttcaagcgcgcttaacgccgttttgttatctcgtagcaaaaggcgattggtgcgtttatcgacggtcatactccctttggcactcagtagcttctcccccgctttcgccagttctcccgcgtcggcgtattgcagggttatactgcgattttccagcggcagatttgcctgcgcccgcgcctgctccgcctcctggcgggcgatattgttattctgccaggcaatggaatgcacactgagaatgttgccttcctgccgcgttatcagtccggcgcttttcactacagtttgtagtgcctgcttccagggaacatctgttagatgtaagctcaccgtaccgctgacgtctgggctcacgaccaggttcaacttctcctgttcagccagcgcctgcaacacctgagctaccggaacgtcatccaccatcagcgtcactttttgcggctttgccgcctgtacgccgggtatcagcatcaacagtagtgcggctatccattgcttcatttgtatctccttgccgttgccacaaccattgtggcggttcgcagtttgtcccggtacccagcgttagtacgtctggcgtcagctgtaaaattgtccagccgttttccagcacatcgttttgctgcacccgtcgccatttcttttgcccgtcttttattacaccgatgatgcgctcgcctcgccctaccatcccctgatagcgccactggctaagttcgctaatccggcatagatcttccggcggtttaaaagggtcacgcataccggttaaaaggcacaatgcaatacctgccaacaaccagcgtttaaccctcatgcggcgtctccagttgtagcgtgaacaaaagatcatcaccttccacgcttaagctaaaacggctcacgctgacgttgcgctctgccagccgtgtaaatgcgctcggcactgcttcccacagcgttttcaacgccaactcgcctccctgcgcggatggatgccaggaaaccagttgcgcgccggataactgaaaatccagtgggctaaagggcagcgttttttcctcgctgaagggagcggtgtctaccaggcgatacagtgcggcccactgctggtgatgacttgcccgtagtcgaattaatgcgtcgcgctcttcatggtgtgtgctactcagaaaaatgagcgtaactaacatcagcaaccagaatgcccagcaaagctggcggaggcggggacttgtggcgaaccaccagtcaaagaacatgttcatcgctaaccttccttgttaactgatactcaaattgccagcgtccctgcgcatcctgctgcgtggctccccgctgattgagatgaaaagatgcatcctggcggagactcgtttctagtgcgtttaacgcggtaatgcttgttgtcagccccttgatctccagcgttccctgctgccagcttatcgttgtcagccaggcgtgctcgggtaaaagcgccgccagtgcttccagcgcagattgccagtcgcgggtaaattgtcgctggcgctgccgttggctacgctgttcgcgtaactgctgttgctccagcaaacgtggcttcgttatctgtaagctgcgggcgagttgttgttccgcctgaagcaaaactgcgtctatgcgcgcttcggcgctgcctgtcagacgcagtattagcgttatcccgacggccagcagcagaggcgcaacgaacatcagcaaccagaaacgcagaaaagcggtccggcgttgctgtcgccagggcaaaaaattaattggcgggttcatcagtacgccttcccaagcgccagccccagcgcgatggcaaagtctccacctggcggcggtagcggcggctgacgaacagaaacggcctcccagggatcaaatccgccttcgccacatatcgcgacgctttcgggatcaacggataacgctgccgccagctccttcgcgctagtcatccccaccgccagtttgcgcccccagctatagcgcgtcgcccacagccactgttcgttatcacgccaggccagacattgctgatgagaaggtaaaaaaggcaggaatcgctgtaatgcactggcatccggggtgatcgcgctcacatgaacacgcaacctttctgccagagtaagcagcgttgccagctctttgctttgcgcggcagtcacgttataggcgggactgagactgtcttcgctgtaatcgaagcgcagggagtccggatccatatccagctcgcgggccatcgtcccactcagccaggccgtttgctcccgctcaccaagggacatgctcgggcgcggaaaactccgctgtaatgtgcgactggcgggaaacgccaacataatgtgatgacgctgcggcagttcgcgactccacggtaacaacgttttagccagctgctgcgcatcaacaatccgcccatctttgataatgtcgttctccagcggcaaccgccaccagcgttgcaaaaagcattcttttgcgccccgcacgatcgcaaccgctaccgcttcttgctgttgtaaatgcaaaccaatttgccagatcttaaatgccattgtgatgatctccttatcacccgtcactctgacgggtatatcaatgcgtctggcttgcctttatactaccgcgcgtttgtttataaactgcccaaatgaaactaaatgggaaatttccagtgaagttcgtaaagtattttttgatccttgcagtctgttgcattctgctgggagcaggcagcatttatggcctataccgctacatcgagccacaactgccggatgtggcgacattaaaagatgttcgcctgcaaattccgatgcagatttacagcgccgatggcgagctgattgctcaatacggtgagaaacgtcgtattccggttacgttggatcaaatcccaccggagatggtgaaagcctttatcgcgacagaagacagccgcttctacgagcatcacggcgttgacccggtggggatcttccgtgcagcaagcgtggcgctgttctccggtcacgcgagtcaaggggcaagtaccattacccagcagctggcgagaaacttcttcctcagtccagaacgcacgctgatgcgtaagattaaggaagtcttcctcgcgattcgcattgaacagctgctgacgaaagacgagatcctcgagctttatctgaacaagatttaccttggttaccgcgcctatggtgtcggtgctgcggcacaagtctatttcggaaaaacggtcgaccaactgacgctgaacgaaatggcggtgatagccgggctgccgaaagcgccttccaccttcaacccgctctacagcatggatcgtgccgtcgcgcggcgtaacgtcgtgctgagccggatgctggatgaagggtatatcacccaacaacagttcgatcagacacgcactgaggcgattaacgctaactatcacgcgccggagattgctttctctgcgccgtacctgagcgaaatggtgcgccaggagatgtataaccgttatggcgaaagtgcctatgaagacggttatcgcatttacaccaccatcacccgcaaagtgcagcaggccgcgcagcaggcggtacgtaataacgtgctggactacgacatgcgccacggctatcgcggcccggcaaatgtgctgtggaaagtgggcgagagcgcgtgggataacaacaagattaccgatacgctgaaggcgctgccaacctatggtccgctgctgcctgccgcagtcaccagcgccaatcctcagcaagcgacggcgatgctggcggacgggagcaccgtcgcattgagtatggaaggcgttcgctgggcgcgtccttaccgtagcgatactcagcaaggaccgacgccgcgtaaagtgaccgatgttctgcaaacgggtcagcaaatctgggttcgtcaggttggcgatgcatggtggctggcacaagtgccggaagtgaacagcgcgctggtgagcatcaatccgcaaaacggtgccgttatggcgctggtcggtggctttgatttcaatcagagcaagtttaaccgcgccacccaggcactgcgtcaggtgggttccaacatcaaaccgttcctctacaccgcggcgatggataaaggtctgacgctggcaagtatgttgaacgatgtgccaatttctcgctgggatgcaagtgccggttctgactggcagccgaagaacagtccaccgcagtatgctggtccaattcgcttacgtcaggggctgggtcagagcaaaaacgtggtgatggtacgcgcaatgcgggcgatgggcgtcgactacgctgcagaatatctgcaacgcttcggcttcccggcacaaaacattgtccacaccgaaagcctggcgctgggtagtgcgtccttcaccccaatgcaggtggcgcgcggctacgcggtcatggcgaacggcggcttcctggtggacccgtggtttatcagcaaaattgaaaacgatcagggcggcgtgattttcgaagcgaaaccgaaagtagcctgcccggaatgcgatattccggtgatttacggtgatacgcagaaaagcaacgtgctggaaaataacgatgttgaagatgtcgctatctcccgcgagcagcagaatgtttctgtaccaatgccgcagctggagcaggcaaatcaggcgttagtggcgaagactggcgcgcaggagtacgcaccgcacgtcatcaacactccgctggcattcctgattaagagtgctttgaacaccaatatctttggtgagccaggctggcagggtactggctggcgtgcaggtcgtgatttgcagcgtcgcgatatcggcgggaaaaccgggaccactaacagtagcaaagatgcgtggttcagcggttacggtccgggcgttgtgaccagcgtctggattggctttgatgatcaccgtcgtaatctcggtcatacaacggcttccggagcgattaaagatcagatcagtggttacgaaggcggtgccaagagtgcccagcctgcatgggacgcttatatgaaagccgttcttgaaggtgtgccggagcagccgctgacgccgccaccgggtattgtgacggtgaatatcgatcgcagcaccgggcagttagctaatggtggcaacagccgcgaagagtatttcatcgaaggtacgcagccgacacaacaggcagtgcacgaggtgggaacgaccattatcgataatggcgaggcacaggaattgttctgattaaaaaggcgcttcggcgccttttcagtttgctgacaaagtgcacttgtttatgccggatacggcgtgaacgcgttatccggctaacaaaatcgtgaaaactcaataaattgcagaaaccccataagcctgataaacattgtgcatcaggcaaacttcacgcatttacactcgcccctgccctttcaaccattcgcgcacgaggaacagcgcactgacattgcgcgcttcattgaagtcagggtcttccagcaaatccatcatatgcgccagcggccagcgcacctgtggtagcggctctggctcatcgccttccagactttccgggtagagatcttgcgctaccacgatattcattttgctggaaaagtaagacggtgccatgctgagcttcttcaaaaaagtcagatcgttcgctccaaatccaacctcttcttttagctcgcggttagcggcttcgtagacgctttcacccggatcaattaatcctttgctaaaacctaattcgtaggattcagttcccactgcgtattcgcggatcaggatcaggtgatcgtccacaatcggcacaatcatcactgcttcccggttggttggacgcattcgttcataaacacgccgcacgccattgctgaactccagatccacgctctcgacggtaaacagtcgggaacgggctacagtttcaacattcagaatggtgggtttttgtaaacttttgctcatcgtgggatctatgctgtgaaatcagcggttattgtgcgatatcggacacgctttcggcaatgtgaattgcatgttatttacatttatgtaacttaataaataatcgtcctcaaatcaaattaaaagtcaataggttgaaataactccaggaatttgctgatattccgccttcagagggtttgctatgatcagcggttactgtgatgtgcttaatgatgctcaagttaaactccacgcttgccgatagccaaccgcagaatcatgtattgtgtccggtgcgactgaccacgcctgacagactaagtaagatggggaaagcatgagcaccattgtgatttttttagctgctttgctggcctgcagtctacttgcgggatggctgataaaagtgcgatccagacggcgtcagctgccctggaccaacgccttcgcggatgcgcaaacgcgtaaactcacacctgaagaacgtagcgccgttgaaaattatcttgagagcctgacgcaggtattacaggtgcctggcccaacgggagccagcgcggcaccgatctctctggcgctgaatgccgaaagcaacaacgtcatgatgctgacacacgctatcacgcgttacggcatctctaccgacgatccgaataaatggcgttactacctcgatagcgtagaagtccacctgccccctttctgggaacagtacatcaacgatgagaataccgttgaactgattcataccgatagcctgccgctggttattagtctcaacggtcatacgctgcaggagtacatgcaggaaactcgcagctatgccttgcaacctgttccgagtacgcaggcgagcattcgcggggaagagagtgagcaaatcgagctactcaatattcgcaaagaaacgcatgaagaatatgcgctgagtcgtccgcgcgggctgcgtgaagcgttgctgatcgtcgcctccttcctgatgttctttttctgcctgattaccccggatgtatttgttccgtggctggcaggcggcgcgttactgctgctgggcgcaggtctgtgggggctattcgcgcccccggcaaaatcctccctgcgggaaattcattgtctgcgcggtacaccccgtcgttggggattgtttggcgaaaacgatcaggaacagatcaacaatattagtctcggtattatcgacctggtctatcccgcacactggcagccatacattgctcaggatctcggtcaacaaaccgatatcgatatctatctcgaccgccatgtagtgcgtcagggacgatatcttagcctgcatgatgaagtaaaaaactttccgttacagcactggctgcgcagtacgattatcgctgcgggcagcctgctggtgctgtttatgctgttattctggatcccgctggatatgccgctgaaattcactctcagttggatgaaaggcgcgcagaccattgaagccaccagcgtaaaacaactggctgacgctggcgtgcgggtaggcgatacattgcgtattagcggtacgggaatgtgtaatattcgaacttccggaacctggagcgcgaaaaccaatagtccttttttaccgtttgactgcagccagatcatctggaacgacgcccgcagtttgccattaccagaatctgaactggtcaacaaagcgacggcattgactgaagcagttaatcgccagctgcaccctaaaccggaagatgaatctcgcgtcagtgccagtttacgtagtgcaattcaaaaatccggcatggtattgcttgatgattttggcgacattgtactgaagacagcggatttatgttctgccaaagatgactgtgtgcgactgaaaaatgcgctggtcaatctcggcaacagtaaagactgggacgcgctggtaaaacgcgccaacgccgggaagctcgatggcgtgaatgtgttattacgcccggtgagtgcggaaagcctggataacctggtggcaacctccaccgcgccgtttatcacgcatgaaacggcgcgagcggcacaaagtctaaacagtccggcccccggcggattcctgattgtcagcgacgaaggcagcgattttgttgatcagccctggcctagcgcaagtctttacgactacccgccgcaagaacagtggaacgctttccagaaactggcacaaatgctgatgcatacgccgtttaacgccgagggtatcgtcacaaaaatcttcactgacgccaatggtacgcagcatattggccttcatccgatcccggatcgttccggcctgtggcgctatctcagcaccacattgctgctactgacgatgctgggtagcgccatttacaatggcgtacaggcctggcgtcgttaccagcgtcatcgcactcgcatgatggagattcaggcctattatgaaagctgcctgaacccgcaactgatcacccctagtgaaagccttatcgaataacacgtttgcgcggcaggttatgctaccctgtcgcgcaaattgcttcactctggagatttccctcatgcatatcaacattgcctggcaggacgtagataccgttctgctggatatggacggcacgttgctcgacctcgccttcgataactatttctggcaaaagctggtgcctgaaacatggggcgcgaaaaacggggttacgccacaggaagcgatggaatatatgcgccagcaatatcacgacgtacagcatacgctaaactggtactgtcttgattactggagtgagcaactgggtctggatatctgtgcgatgaccaccgagatgggaccgcgtgccgtactgcgtgaagataccattccgtttcttgaggcactgaaagccagcggtaagcagcgaattttgctcaccaatgcgcatccgcacaacctggcggtaaaacttgagcataccggtctggacgcacaccttgatttattactttccacccacacatttggttatccgaaagaggatcagcggttatggcatgcggtggccgaagctacgggtctgaaagctgaaagaacgctgtttattgatgacagcgaagcgattctcgatgctgccgcgcaatttggtattcgttactgcctcggcgtgactaatcctgattccgggattgccgagaaacagtatcaacgccatccgagtctgaatgactaccgccgcctgatccccagcctaatgtgaaggagacgccatgaaagagaaacctgctgttgaggttcgactggataaatggctatgggctgcccgtttttataaaacccgcgcgctggcccgtgaaatgattgaaggcggtaaggtgcattacaacgggcagcgcagcaagccgagcaaaatcgtcgagctgaatgccacgctcactctgcgccagggaaatgacgaacgcacggtgattgtaaaggcgattactgaacagcgtcgccccgccagcgaggcagccttgctgtatgaagagactgcggaaagtgtagagaaacgcgaaaaaatggcgctggcacgtaaacttaatgccttaaccatgccgcacccggaccgacgcccggacaaaaaagagcgccgcgacctgttacgatttaaacacggcgacagtgaataactgtcacctgcaagagagatgattatgccgcaacatgaccaattacatcgctatctgtttgaaaactttgccgtgcgcggcgaactggtaaccgttagcgaaaccctgcaacagatccttgagaaccacgattatccgcagcccgttaaaaacgtgctggcagaactgctggttgcgaccagcctgttaaccgctacgctgaagtttgatggtgatatcaccgtacagctgcagggcgacggtccgatgaatctggcggttattaacggtaacaataaccagcagatgcgcggtgtggcgcgcgtgcagggcgaaattccagaaaatgccgacctgaaaacgctggtcggcaatggttacgtggtgatcaccattaccccgagcgaaggcgaacgctatcagggcgtagttggtctggaaggtgataccctggcggcctgcctggaagattactttatgcgttctgaacagctgccgacgcgcctgtttattcgcaccggcgacgtagacggcaaaccggctgcaggcggtatgttgttgcaggtaatgcctgcgcaaaatgcccagcaggacgactttgaccacctggcgacgctaaccgaaaccatcaaaaccgaagaactgctgaccttaccggcaaacgaagtgttgtggcgtttgtatcacgaagaagaggtgacggtttacgatccgcaggatgtggagttcaaatgcacctgcagccgtgaacgttgcgccgatgcgctgaaaacgctgcctgatgaagaagttgatagcatcctggcggaagatggcgaaattgacatgcattgtgattactgcggtaaccactatctgttcaatgcgatggatattgctgaaatccgcaacaacgcgtctccggcagatccgcaagttcattaatgagtatgtccggcagagagggctctgccggattttacgactaatacacctgatgcgctttgtcactcattcagattcacattcagcctttcaccatccactacaagatcgcgccacgctttaggcttcgtccccagttttccatccttcgcagctgtgagtaatttttctttcgttatttcgttcggaagtaaactcatatcaagcgcgtcccattcttttctgtcactgtcaaagccatagacaatgactctgtcatcattaaaagcaaacaggatccgctccgcctgaccatcactattcagatcttgctcgaccaggacgcaggcgtctttttcaatacaggtcatcacgttatagcgatcctggattaaggcgctccagaatgtcgcatcaggtttaacagaaccaggggcaattaacacattatcggctaatactttttcgcttacctgttgctgaagatgttgctctccatctaacgccatcagcagatcccgcgcgcgtttcgggtctttcataaacccggcatcgcttttcaggctctcaagcgcagcacgtccatagcgaccgctctgctcgagcatgtagatagttacctggtcactcgtgtttttgccgctctgataacgcgccatatggctgttcacgctaatgcgcatactgtccagcaccgggctattaagaagcaccagtatcaccaacaccaataagctaaccgcaaggttcactttgccctgaagaacaacgggattttgccctttacgccagacgatgctgacaaaataccccaggctccacaccagtaacaccagcaccgccagcacgccctgcaagcggtcgacagtccagccgtactgagcgacccgcagccataacgcccaggcggcgacgaacacatacagcggagcaaccagcaaagcggttttaatcaggcaacgcaacggccctgtccagggaagactcgctttttgcggatcgcggacaatagccattaagatcaattgcaaaaaggccagcgtcaacagcaacccggcggcggagatgtggcgagaaatcgcgctcaggcccgtaaacggcagggtgatgataaacatcagggttagcaaacttactaacggcagcaaccccgtggcgattaacgtgaacaacttttgaatagagtcgattaaacgactctgtgttcgcgcgaggatcaccgccagcgcggtaaccagacctaacgtgagataaataaaccagtcggttgcaaaaaagagcgtattgaaaaacgtgatgccaacaagtttaaacaactcactccacagtaaaagcaccagccacgtcaagccattggcgagaaaaatcaccagtaatataagtacgttatgccatacactctggtaaaaatagcgatagcggctactgtcattgcggatgcgaaggctttgttgtatccacggtagcaacaacattgccatcaacagcagatagcaaccaaaatcccaaagcgccttttcagctctccaggggttcatgccatcagtttgccacttcagccagccgctcatccccagcgtggcaataaacactagcgccagccatccccaaaggcgcttctgtttaaaagagatcacggagaagagtaaaacggaactaaacgcgacggtcgcaggcacgccataaacaatccaactgtgattttttccggaaagccaggcgatcagcaggtagcaaaccagaccctgaagtaatccggtagcaatcatcccccagcgtgttgcgggactaagttcaacgttatccatgttggttatccagaatcaaaaggtgggttaattatcgcatccgggcagtagtattttgcttttttcagaaaataatcaaaaaaagttagcgtggtgaatcgatactttaccggttgaatttgcatcaatttcattcaggaatgcgattccactcacaatattcccgccatataaaccaagatttaaccttttgagaacattttccacacctaaaatgctatttctgcgataatagcaaccgtttcgtgacaggaatcacggagttttttgtcaaatatgaatttctccagatacgtaaatctatgagccttgtcgcggttaacacccccaaaaagactttactattcaggcaatacatattggctaaggagcagtgaaatgcgcgttaacaatggtttgaccccgcaagaactcgaggcttatggtatcagtgacgtacatgatatcgtttacaacccaagctacgacctgctgtatcaggaagagctcgatccgagcctgacaggttatgagcgcggggtgttaactaatctgggtgccgttgccgtcgataccgggatcttcaccggtcgtagtccaaaagataagtatatcgtccgtgacgataccactcgcgatactttctggtgggcagacaaaggcaaaggtaagaacgacaacaaacctctctctccggaaacctggcagcatctgaaaggcctggtgaccaggcagctttccggcaaacgtctgttcgttgtcgacgctttctgtggtgcgaacccggatactcgtctttccgtccgtttcatcaccgaagtggcctggcaggcgcattttgtcaaaaacatgtttattcgcccgagcgatgaagaactggcaggtttcaaaccagactttatcgttatgaacggcgcgaagtgcactaacccgcagtggaaagaacagggtctcaactccgaaaacttcgtggcgtttaacctgaccgagcgcatgcagctgattggcggcacctggtacggcggcgaaatgaagaaagggatgttcagcatgatgaactacctgctgccgctgaaaggtatcgcttctatgcactgctccgccaacgttggtgagaaaggcgatgttgcggtgttcttcggcctttccggcaccggtaaaaccaccctttccaccgacccgaaacgtcgcctgattggcgatgacgaacacggctgggacgatgacggcgtgtttaacttcgaaggcggctgctacgcaaaaactatcaagctgagcaaagaagcggaacctgaaatctacaacgctatccgtcgtgatgcgttgctggaaaacgtcaccgtgcgtgaagatggcactatcgactttgatgatggtagtaaaaccgagaacacccgcgtttcttatccgatctatcacatcgataacattgttaagccggtttccaaagcgggccacgcgactaaggttatcttcctgactgctgatgctttcggcgtgttgccgccggtttctcgcctgactgccgatcaaacccagtatcacttcctctctggcttcaccgccaaactggccggtactgagcgtggcatcaccgaaccgacgccaaccttctccgcttgcttcggcgcggcattcctgagcctgcacccgactcagtacgcagaagtgctggtgaaacgtatgcaggcggcgggcgcgcaggcttatctggttaacactggctggaacggcactggcaaacgtatcagcattaaagatacccgcgccattatcgacgccatcctcaacggtagcctggataatgcagaaaccttcactctgccgatgtttaacctggcgatcccaaccgaactgccgggcgtagacacgaagattctcgatccgcgtaacacctacgcttctccggaacagtggcaggaaaaagccgaaaccctggcgaaactgtttatcgacaacttcgataaatacaccgacacccctgcgggtgccgcgctggtagcggctggtccgaaactgtaatgatttgaagctggagaatatctatccagtatcttatagaaagcaaaacgggaggcaccttcgcctcccgtttatttacccttcttttgtcgtgccctgcgcccgcgttaccggcactggcagccaggcgcgaatggaaagcccgccccgctcgctggtgccaagctccagcatcccgttatggttatccacgatacgctgcacaattgccagccctaatcccgtgccgctaatggtgcgcgcactgtcgccgcggacaaacggctggaacaggtgcttacgttgttccggcgcaattcccggaccgtcatcttccacctggaaccaggcgcgattcggctccgttccgctgctgactttgatccagccattgccataacgggcggcgttgaccaccatattcgccaccgcgcgtttgatgctcagcgggtgcattttcacttcaatgctgccggggtaaagcgcggtttcaatttcccgctcatagccactttcggcagcaatcacctcaccgagtactgcattaagatccgccatttccatcggcatctcctgcccggtgcgcaggtagtcgataaactgctcaatgatggcgttgcactcttcgatatctttattgatgctttctgccagatagccatcctgctcgctcatcatctcagtcgccaggcgaatacgcgtcagcggcgtgcgcaagtcgtgacttacccccgccatcagcagcgtgcggtcatccgccagttgcttaacaccagccgccatatggttaaaggcacgggtaacggaacgcacctcgctagcgccatactcacgcagcggcggcggaataatccctttaccaacctgcaaggctgcgtgttcgagatcgaccaacggtcggttctggatacgaataaacagccacgccccgcctatcgccaatagcataatcgccagcgtatagcggaacagcggagagaaatcgccctgatgaatttcggtcagcggcacgcgtacccagatattggggctcagccaggttttcagccagacgacagggctacttttgttgacctcaacgcgcacttccgtcgggccgcccagttgctgcgccatctgatggcttaagaattcatagtgttgcgcccaacgcagacctgcctcttcggcagcctcgttggagtagagagagatccccagctcacggtagatctcccgacggaaagcgggaggcacaaccaactgcgtgccgtcctccagttgcagtttgtcggtcatcaacatacgcacttcgtacgcgaggactttattaaactgctggaggctcggcaaaatcgcgaagttcagcaccaccagataagtcgtcaccaggctggcgaacagcaaggtgacgatgagcaataacgtacgggcaaaactacttcgtgggctgaagcgcaatcgcctcatgctttagagccgtccggtacaaagacgtagcccagaccccagacggtctgaatgtaacgcggatgcgctggatcttcttccaccatgcggcgcagacggctaatctgcacgtcgatggagcgttccattgcggaatattcacgaccacgggcaaggttcatcagcttatcgcgggagagcggctcacgcggatggctgaccagtgccttcagtaccgcaaactcaccgctggtgagcggcatcggctcgtcttcgcggaacatttcgcgcgtaccgaggttaagtttgaacttaccgaaagcaattaccgcctcttcctgactcggtgcgcctggcagttcgttcgcctgacgacgcagcaccgcacggatacgggccagcagttcacgcgggttaaacggttttggaatgtagtcgtcagcgccaatctccaggcctacgatacggtccacttcttcccctttcgccgtcaccataatgatcggcatcgggttgctctgactacgaagacgtcggcaaatgctcaagccatcttcaccaggtaacattaaatccagtaccataagatggaaagattcacgagtcagcaggcgatccatctgttctgcattagcgacgcttcgaacctggaagccttgttcggtgagataacgttccagcagcgcacgcaggcgcatgtcgtcatcgaccaccagaatcttgtagttctcttgcattgtttgtactcccaaaggttcgcaacaatttgtaagcgtgtattcttaaaaaagctcacgttcgtcaccagctaaatctggtatgaatttcagcctaaattgttacaaagcatattaaacagcagcttaagtatacaatttattcggcgaaacattattgattctgttgatatgatcacgttatacccaatgtgcgcattatcaaacagacaaagggaatcaacgagatgaaaacgcccctggttacccgggaagggtatgaaaaactcaaacaagagcttaattatctctggcgtgaagaacgcccggaggtcacaaaaaaggtgacctgggccgcaagtctgggcgaccgcagcgaaaatgctgactatcagtataataaaaagcgtctgcgtgaaatcgaccgtcgcgtgcgctatctcactaaatgcctggaaaatctcaaaatcgtcgattactcccctcagcaggaaggcaaagtcttttttggcgcgtgggtggagattgaaaacgacgatggcgtgactcaccgtttccgtattgtcggctacgatgaaatttttggccgtaaagattacatctctatcgattccccgatggcccgcgcattgctgaaaaaagaagtcggcgatctggcggtggtgaatacccctgccggggaagcgagctggtatgttaatgctatcgagtacgtgaaaccgtaaggaagagtcttaacctcctgccgatggctggcatttttgccagccagtccgtataactatcccctgatttttgatccgaaaagatgaactcaaaccatgatgaatgatagcttctgccgcattattgcgggtgaaattcaggcgcgcccggaacaggttgacgctgccgttcgcctgcttgacgaagggaataccgtgccgtttatcgcacgttatcgtaaggaaatcaccggcggtctggatgacacgcagctgcgtaatctggaaacgcgtctgagctatctgcgcgagctggaagagagacgtcaggcgatcctcaagtccatttccgagcaaggcaaactcaccgatgatctggcgaaggccatcaacgccaccctaagcaaaaccgaactcgaagacctctacctgccctacaaacctaaacgccgcacccgcgggcaaatcgccattgaagcagggcttgagccgttggctgacctgctgtggagcgatccgagtcacacgccagaagtcgccgctgcacaatatgtttatgccgataaaggcgtggcagataccaaagccgcgctggatggcgcgcgctatatcctgatggaacggtttgccgaagatgccgcgctgctggcgaaagtgcgtgattatctgtggaagaacgcgcatttggtttctacggtggtgagcggtaaagaagaggaaggggcgaaattccgcgactatttcgatcatcacgaaccgttgtccacggtgccttctcaccgcgcgctggcgatgttccgtgggcgtaacgaaggcgtacttcagcttagcctgaatgccgatccacagttcgatgagccgcccaaagagagctattgcgagcaaatcatcatggatcaccttggcctgcgcctgaacaatgccccggcggatagctggcgcaaaggcgtggtgagctggacgtggcgcatcaaggtgctgatgcatctggaaaccgaactgatgggcaccgtgcgcgaacgtgcggaagatgaagcaatcaacgtctttgcccgtaacctgcacgatctgctgatggcggcccctgccggactgcgtgcaacgatgggcctcgatccgggtctgcgtactggggtaaaagtggcggtggtcgatgccactggcaaactggtggcgaccgacaccatttacccgcacaccggacaggccgcaaaagcagcgatgaccgttgctgcgctgtgtgaaaaacataacgttgaactggtagcgatcggtaacggtacagcttcccgcgaaactgagcgtttctatctcgatgtgcagaagcagttcccgaaagtgaccgcgcagaaagtaatcgtcagcgaagcaggcgcgagcgtttacagcgcttccgagctggctgcacaggagttcccggatctcgacgttagcctgcgtggcgcggtgtctatcgcccgccgtttgcaggatccgctggcggagctggtgaaaatcgatccgaaatctatcggcgtaggtcagtatcagcatgacgtcagccagacgcaactggcccgcaaactggacgcagtagtagaagactgcgtaaacgccgttggcgtcgatctcaacactgcttctgttccgctgttaacccgcgtggcgggcctgacgcgcatgatggcgcaaaacatcgttgcctggcgcgatgagaacggtcagttccagaaccgtcagcaactgttaaaagtgagccgtctggggccgaaagccttcgagcagtgcgcgggcttcttgcgcattaaccacggtgataacccgctggacgcgtctaccgttcacccggaagcctatccggtggtggaacgcattctggcagcaacacagcaggcactgaaagatctgatgggtaacagcagcgaactgcgtaacctgaaagcgtctgactttactgatgagaaattcggtgtgccgacggtaaccgacatcatcaaagagctggaaaaaccgggtcgcgatccgcgtccggaatttaaaaccgctcagtttgccgatggcgtcgagacaatgaacgacctgcaaccgggtatgatcctcgaaggcgcagtgaccaacgtcaccaactttggcgcgtttgtcgatattggcgtgcatcaggacggcctggttcacatctctagtttgagcaacaagtttgtggaagatccgcataccgtggtgaaagcgggcgacattgtgaaggtgaaagtgctggaagtggatcttcagcgtaaacgtatcgccctgactatgcgcctggatgagcagcctggcgaaaccaacgctcgtcgcggcggcggtaatgaacgcccgcaaaacaaccgcccggcagccaaaccacgcggtcgtgaagcgcagcctgccggtaatagcgcgatgatggatgcgctggcggcggcaatgggcaaaaaacgttaaacgcccgtactggcctacggttcgaatttgcacgaaatcgtagggcagataaggcgttcacgccgcatctggcaacgaacgccttgcctgacataaaagtgccggagaatatctccggcatttttattccacagccaaactcataatatattccggcaatatttatcatttcattaacaactgaaaccttaattaaacattagccagtccgggtaattcactattcgaattatattttcgctgcgatataaccttgagccacatcaacattgagtcagattattattcaaaccaacattcgcacacattttaagtattgctgatagaaaccattctcattatcattgtgttgttgattatttaatctctcctttgttggcaaatcatctggtctcatgtcgctgtcaaacgccccatgaggtagttatccagttaatgagaaacaagtaggcacctatgcaatacactccagatactgcgtggaaaatcactggcttttcccgtgaaatcagcccggcatatcgccaaaaactgctttctcttggcatgttacctggctcctcttttaatgtggtgcgcgtcgctccactcggcgaccccattcatatcgaaacccgtcgtgtgagcctggtattacgcaaaaaagatctggccttattagaagtggaagcggtttcctgttaatacggtgataacaacaatgaaaaaattaaccattggcttaattggtaatccaaattctggcaagacaacgttatttaaccagctcactggcagtcgtcagcgtgtaggtaactgggctggcgttaccgtcgaacgtaaagaagggcaattctccaccaccgatcatcaggtcacgctggtggacctgcccggcacctattctctgaccaccatcagtagccagaccagcctcgatgagcaaatcgcctgtcactacattttgagtggcgacgccgacctgctgattaacgtggtggatgcgtctaaccttgagcgtaacctgtacctgacgctacaactgctggaactcggcattccctgcattgtggcactgaacatgctcgacattgccgagaagcaaaatattcgtattgaaattgatgctctgagcgcgcgtctgggctgtccggtgatcccgctggttagtacccgtggtcgcggtattgaagcgctcaagctggcgattgatcgctataaagctaacgagaatgtggaactggtgcattacgcacagccgctgctcaacgaagcagatagtctggcaaaagtgatgccttccgacatcccgctgaaacaacgtcgctggctgggcctgcaaatgctggaaggcgatatctacagccgcgcctacgccggtgaagcgagccagcatctggatgccgccctcgcccgtctgcgtaatgagatggacgatccggcgctgcacattgccgatgcgcgttaccagtgcattgctgccatctgtgatgtggtaagcaacaccctgacggcagaacccagccgtttcaccactgcggtagataaaatcgtgctcaaccgtttcctcggtctgccgattttcctctttgtgatgtacctgatgttcctgctggctatcaacatcggcggggcgttacagccgctgtttgacgtcggctccgtggcgctatttgtgcatggtattcaatggattggctacacgctccacttcccggactggctgactatcttcctcgcccagggcctgggtggcggcattaacaccgtgctgccactggtgccgcagattggcatgatgtacctgttcctctccttccttgaggactccgggtatatggcgcgtgcggcgtttgtgatggaccgtctgatgcaggcgctgggcttgccggggaaatcctttgtgccgctgatcgtcggtttcggttgtaacgtaccgagcgtaatgggtgcacgtacgcttgatgcaccgcgtgaacgtctgatgaccatcatgatggcaccgtttatgtcctgcggcgcgcgtctggctatcttcgcagtattcgcggctgccttcttcgggcagaacggtgcgctggcggtcttcagcctgtatatgctgggtattgtgatggcggtgctgactggcctgatgctcaagtacaccatcatgcgcggtgaagcgacgccgtttgtcatggagttgccggtctatcatgtaccacacgttaaaagcctgattatccagacctggcagcgtctgaaaggcttcgttctgcgtgctggtaaagtgatcatcatcgtcagcattttcctgagcgctttcaacagcttcagcctgagcgggaaaatcgtcgataacatcaacgacagcgcgctggcgtccgtcagccgggtgatcaccccggtcttcaagccaattggcgtgcatgaagataactggcaggcaacggttggcctgtttacaggtgccatggcgaaagaagtggtagtgggtacgctcaacaccctctacaccgcagaaaatattcaggacgaagagttcaatccggcagaatttaacctcggtgaagagctgttcagtgcgatagatgaaacctggcagagcctgaaagacaccttcagccttagcgtactgatgaaccccattgaagccagcaaaggcgacggcgaaatgggtaccggggcgatgggcgtgatggatcagaaattcggtagcgcagcagcagcttacagctacctgattttcgtcctgctgtatgtaccatgtatcagcgtgatgggggctatcgcccgtgaaagtagccgtggctggatgggcttctccatcctgtgggggctgaatatcgcttacagtctggcaacattgttctatcaggtcgccagctacagtcagcatccaacttacagcctggtgtgcattctggcggttatcctgtttaacatcgtggttatcggtctgctgcgccgcgcgcgtagccgggtggatatcgaactgctggcaacccgcaagagcgtaagcagttgctgcgcagccagcaccaccggtgattgccattaatggctagtcttattcaggtgcgcgatttgctggcgttacggggccgtatggaagcggcccagataagccagacattgaacactccacagccaatgattaacgccatgctgcaacaactggaaagtatgggcaaagccgtgcggattcaggaagaacctgacggctgcctctctggcagttgtaaaagctgcccggaaggaaaagcctgtctgcgcgagtggtgggcgctgcgttaaccttactccatcgcctgttttggaaagcccggtatgcgtctgcatccgggcttttttgcgtgcggctttccataaaaatgcaactcttgcagcacggcgtaagttcctttgaaagcatctcgcagggatgaaaactcgctaatacacaggtgtggagtggcgcgtagagtcgcggcattcaaacaacaggtgaaggaacgccatgagcaaaaagcagagttccaccccacacgatgcgctgttcaaactctttttacgccaaccggacacggctcgtgattttcttgcgtttcatttaccggcacccattcacgcgctttgtgatatgaaaaccctcaagctggagagcagcagctttattgatgacgatctgcgtgaaagctattccgatgtgctgtggagcgtgaaaacggaacaaggaccaggatacatctattgtctgattgaacatcaaagcaccagtaacaaactgatcgcatttcgcatgatgcgttacgctattgccgcaatgcaaaatcaccttgatgctggatacaaaacgttgccgatggtggtgccattgttgttttaccacggtattgaaagcccctatccctatagcctgtgttggctggattgtttcgccgatcccaaactggcaaggcagctttatgcctccgcatttccgctgattgatgtcaccgtcatgcctgatgatgaaatcatgcagcaccgacgtatggcgctgctggagttaattcaaaaacatattcgtcaacgcgacctgatggggctggtagagcaaatggcctgcttattaagtagtggatacgctaatgacagacaaatcaaagggctgtttaattacatactgcaaactggcgacgctgtacgttttaacgattttatcgacggcgttgccgaacgtagtccgaaacacaaggagagtttaatgactattgcggaaagattgcggcaggagggggaacaatccaaagccctgcatatagccaaaataatgcttgaatccggagttcctcttgcagacatcatgcgctttaccgggctgagtgaagaagagttggctgcggcgagtcagtaaagttctgtctcgccatttcaaaagccacttacaccctctgcttcaacgccaccagcaggtgacaaaactcggccggatggctaataaatggcgcatgggccgctttggcgaagatataactttcgctgtgaggccaaagtttatccagcatcggcaccactttgcgcggcaccagaccgtcgagatagccatacaatcgcaaaaacggcatggacacgttttgcagcggctgacggagatcgaccgttttcaggatttccagcccgccattaagcacgtcaacctccggcatcggtaacgccagaacggttttcttcaacgcccgcgcatcctggcgcgccgtttcagtccccatggtttgtaacgccaggaaccgctccactgtacgctgaaaatcatcactgagttgctgctgaaatcccgccagcacgtccggttttatccccggccactcgtcacgagcactaaaacaaggactgctcgccacggtgaccagcgcctgaacacgctcgggatgggttaacgcaatctggcttgccaccagcccgcccagactccagcctaaccaaatggctttatcaggtgcctgttgcagcacggcttcggccatatcagcaagactcagcgcaccaaatccccggctacgcccgaagccgggcaggtcaacaaggtgcagcgtaaaatggctgctaagttcctcgtcaatgcaacgccacacttcggcattcagtccccatccgtgcagcagcacaagatgaacattcccctgacctttggtctgccaccagatgttattcatccgctattgttctcttttgacttacaaggatgaacatatgctaacagtaccgggattatgctggctatgccgaatgccactggcgttaggtcattgggggatttgtagcgtctgtagtcgcgccacccgcacagataaaacgttatgcccacaatgtggattacccgccacacactcccatcttccctgcggtcgctgcctgcaaaaaccgccgccctggcaaagactggtcacggttgccgactatgcgccgccgttaagtccgcttatccaccagcttaaattttcccggcgcagtgaaatcgccagcgccctgagtcgtctgttactattggaagtcttacacgctcgtcgcaccaccgggttgcaattgccggatcgcatcgtcagcgttccgttatggcagcggcgtcactggcgtcggggatttaatcagagcgatttgctgtgtcagccgttaagtcgctggttgcactgccaatgggatagcgaagccgtcacacgtacacgggccactgcgacccagcattttctcagtgcccggctgcgcaagcgcaacctgaaaaatgcctttcgtcttgaattgcccgtgcaaggtcgccatatggtgattgtggatgatgtcgttaccaccggaagtaccgtcgcagagattgcgcagttgcttttacgcaatggtgcggcggctgtccaggtctggtgcctttgtcgaaccttgtaaagcctcgatgatgggcgtattataaccaactaaaatagtcaactattaggccattactatgatccgtatttccgatgctgcacaagcgcactttgccaaactgctggcaaatcaggaagaagggacacaaatccgcgtatttgtgattaaccctggcacgcctaacgctgaatgtggcgtttcttattgtccgccggacgctgtggaagccaccgacacagccctgaaatttgacctgctgaccgcgtatgttgatgagttaagcgcaccatacctggaagatgcagagatcgattttgttaccgaccagttgggttcccagttaacgctgaaagccccgaacgccaaaatgcgtaaagtggcagacgatgcaccgctgatggagcgcgtggagtatatgctgcagagccagatcaacccacagcttgctggtcacggtggtcgcgttagcctgatggaaatcaccgaagacggttacgccattctgcaatttggcggcggctgtaacggttgttccatggtcgatgtgacgctgaaagaagggatcgagaagcagctgctgaacgaattcccggagctgaaaggtgtgcgcgatctcaccgaacaccagcgcggcgaacactcctactactaagttatcccctcttttgtagattgcccgatgcgacgctaaagcgtcatttcgggcctacgttgaacatgtgccagacgttggcgcagcattgctttgtcaaatcctcggttcgtttccccgcgataatatgaccaacctctcataatttaaatttaccccgctctggtgattctcaaacgccagatgttacccgtatcattcacatgggtaccaaacatactcctgacatctgactacaataattagttttagtgggtatcagtcgtggtgccgcaatatctctgttcccgattgggataattagagtttgtcgtcagaaaattgacgttacccataacaaatgaaaggccaggtaaatcatgccattagtcattgttgctatcggtgtaatcttgttgttgctcctgatgatccgcttcaaaatgaacggcttcatcgctctcgtcctcgtggcgcttgctgttggattaatgcaaggaatgccgctggataaagttattggctccatcaaagccggtgtcggcgggacgctcggtagccttgccctgatcatgggttttggcgcaatgctgggcaaaatgctggcagactgcggtggcgcacaacgtatcgccaccacgctgattgccaaatttggtaaaaaacacatccagtgggcggtggtactgaccggttttaccgttggttttgccctgttctatgaagtgggctttgtgctgatgctgccgctggtgtttaccatcgcggcttctgcgaatattccactgctgtatgttggtgtaccaatggcggctgcactgtctgtgacccacggcttcctgccaccgcatccgggtccgactgcgattgccaccattttcaatgccgatatgggtaaaaccctgctgtacggtactattctggcaatcccgaccgtgattctcgccggtccggtttacgctcgcgtgttgaaaggtatcgataagccaattccggaaggtctctacagcgcgaaaaccttcagcgaagaagagatgccgagctttggcgtcagcgtctggacctctctggtgccggtagtactgatggcgatgcgtgcgattgccgaaatgatcctgccgaaaggtcacgctttcctgccggtagcggagttcctcggtgacccggtaatggcaacgctgattgccgtgctgattgcgatgttcacctttggtctaaaccgtggtcgtagtatggatcagattaacgacacgctggtttcttccatcaaaatcattgcgatgatgctgttgatcatcggtggtggcggtgcgttcaagcaggtgctggtagacagcggcgtggacaaatacattgcttccatgatgcacgaaaccaacatttctccgctgctgatggcctggagcattgctgccgtactgcgtatcgcgctgggttccgcaaccgttgcggcaatcactgcgggtggtatcgcggcaccgctgattgcaacgacgggtgttagcccggagctgatggttattgcggttggttccggtagtgtgattttctctcatgtgaacgatccgggcttctggctgttcaaagagtactttaacctgactatcggcgagaccatcaaatcctggagcatgctggaaaccattatcagcgtgtgcggtctggtaggctgtctgctgctgaatatggtgatttgataacactgactgccggatgcggcgtgaccgccttatccggcctacgattcgggatgaattagtaggccggataagacgcgtcaagcatcgcatccggcatcaaccgcactttacttcttcttcgctgcagctctgcgccgtctgtccaaatccttcagcaacttgttcacgccatcatcggcaaacatgctctcaagcgttgcggaaagcttgcgtcgccagtttttatactggtaactggtgccaggaatattcaccggttcggccatatccagccagtcttccggctgtagtcctaacagagcactgttactgtcggcaatgtagcgctgcaaaccacggttcagcgtcggcgtcatgctcatcaagcttgccttatgcccggcacgtttcggcagacaaccatatttatgcagtgcatccagcagcccttgcttcgccagttcgcgatcctgatacagaccgcgcagtaccacttcatccggatacagccccagggttttgcccagcgttagatccccgcactcccagtaaccgcgcagcgttggcaggtcatgtgtcgccgcaaccgccatgctctgctccggatacgctttcggtgcacggaacgtcttctcgtggtcgttttcgaaatagagcactttgtaagagtacacaccgctgctgcgcagcttaccgacaatctctaccggtacggtaccgagatcttcaccaatcaccatacagcgatgacgtttactttcgagtgccagaatgctgagcagatcatccaccggatagtgaacatacgcgccctgatctgccgtctcgccatacggtatccaccacaaacgcagcatgctcatcacatggtcaattcgtaatgcgccgcagttttgcatattggcacgcaacagctcgataaacggttcataggcacgcgcggtgatgatatgcgggtccattggcggtaatccccagttctgccccaacgggccgaggatatccggcggcgcgccaacgcttgctttcaggcaatatagttcacggtcacaccaggtttccgccccaccttccgctacgccaaccgccagatcacgatacaagccaatcggcatttcatagccctggcttatctcccagcaggcggcaaactggctgtaagccagccactgcaaccagagataaaaatcgacgtcatcacgatgttcttcgcagaactgacgcacttctggactatccacgttctgatacatctctggccatgcaggccagccccagcgcatttcgtcctctttcacttgctgggcatgtagcgcatcaaaggctgcctgccagaacaggctgtcgccctgctctgcaacaaactggcgaaacgcggccatctgctcatcatcacgttgcgcgaaacctttccacgccattcgtaatgctgtcatttttagggcggtaaccgtggagtaatcgacccagtcggcatcgcgcgcctgttgcagcgtctgttgcgtggtcggcaactgccaccaggcctgagcctcttcgctaagatggaaatcttcaacggcgttaacgtcgatataaatcacattcagccaacggcgagaagacgggctgtatgggctggcgctctccggatttgccggatagagcgcatgaatcgggttcaggccaatgaagctcccgccacgttttgccacatccaccagcatcgctttgagatcgccaaaatccccaataccccagtttttttcgcttcgcagcgtataaagctgaacgcaggcaccccacagcttttgtttattcagcaacgcctgcggttcgtaacagcgtttcggggcgacaatcacccggcaatgcgcgcgctggtcgtcctgggtgagtgtcagcgtgtgataaccttccggcagcttcgtcggtagattgaacgctttgccccccgttacatggcctttgtactgcgttccttcttcggtggtcagcagccagctatattcgccgctgccctccaccaccatcggcatttttttgccgctggtataaaccatgacattcgggactggcgttaccgccactttcgtggcggtacgttgatgcatcgcgtcaagcaaacgccgtttggtttcggcgctaatgctctgcggtttaccgtgggcattgatgtaattggggctaatccccgccgccagcgcggcattatccagacgtttgctttccatcgagcttccttagcgttttgcctgccagatacgagcctgataatcgcgaatagagcgatcgctgctaaacataccgcagcgggcggtattgaggatcgccgcgcgagtccaggcctcctggtcgcggtacagcacatccacctgcttttgtgcctctacataggctgcgaaatccgccatcaccagatacggatcgccgccctgtttgccgatactgtgcagcatctggtcgaaggcatgcttatcgccgtcgctgtatttaccgctttccagctctttcaatactgcgtccagcaccttatctttcttccgccatttcaccgggtcgtagcctttggccagaattgccttcacttgttccacggtatgaccaaaaataaagatattttcttcaccgactttctcggcgatttcaacgttcgccccatccagcgtaccgacagtaagcgcaccattgagcgccagtttcatattgccggtaccggaagcttctttacctgcagtgctaatttgttcggagatatccgccgccgggatcagtttttccgccgcgctaacgcaataatccggcaggaacaccaccttcaacttatcgccaaccagcggatcgttgttgatcacgtcagccactttgttgatcgcaaagataatattcttcgccaggtagtagcccggtgccgctttcgcgccgaagaggaagacgcgcggtacgcgatcagcctgcgggttttcacgaatttctttgtacaacgccagaatatgcagcagattcaggtgctggcgtttgtactcatgcaaacgtttgatctgaatatcgaaaatcgcctgtggattgatctcaataccggtacgaactttcacaaactccgccagacggactttattcgcctgcttgatctcgcgatattgctgacggaatttcgcatcatcagcgaatttttccagattgatcagctgatcgagatcgttagcccactctttttgcagacttttatccaacagagccgccagtgccgggttgcactgtttgatccagcgacgtggggtaataccgttggtgacgttatggaatttgttcggccatagctggtgatattccgggaacagatctttcaccaccagatcgctgtgcagcgccgcaacaccgttcaccgcgaaaccgccaaccacacacaggttcgccatatgcacttgtttgtcgtgcaccaccgccagtttggcccacactttttcatcgcccggccaggttttctctaccagcgttttaaagcgagtattaatttcgttaataatctgcatgtggcgcggcagtaagcctttcaccagtttcacatcccagcgttccagcgcttctggcatcagggtatggttggtgtaagcgaaagttttgctggtaatggcccaggcgtcatcccagctcatctggtgctcatcgatcagcacgcgcagcagttctggaatcgcgatagttgggtgggtatcgttcagctgaataacttcgtaatccgccagttcgtgcagtttacgccccgccagatgatggcgacgcaaaatatccgctacgctacaggcacactggaagtattgctgcatcaggcgcagctttttaccggcagtatggttgtcgtttggatagagaactttggtcagtttttccgcattgatgccctgctgttcggcacgcaagaaatcaccgtcgttaaatttagtcagatcaaacggatgcgcgtgcgtcgcctgccacagacgcagcggctgcgccacgccattacgatagccgacaacggggagatcccacgcttgaccggtaatggtaaactccggctcccagcgtccgtctttcgtcactttaccgccaatccctacctgcacatccagtgcttcgttgtggcggaaccacgggtagttactgcgatgccagtcatccggcgcttcaacctgtttgccatcgacaaaagactggcggaacaaaccatattgatagttcagaccgtaacccgtcgcagactgaccgacagttgccatactgtcgaggaagcacgccgccagacgtcccagaccaccgttacccagcgccgggtcgatctcttcttccagcaggtccgtcagattgatgtcataagccttcaagctatcctgtacatcctgataccagccgagattcaacaggttgttgcccgtcaggcgaccaatcaaaaactccatactgatgtagttaacatgtcgctgattcgccaccggcttggcgaatggctgagcacgcagcatttcggccagtgcttcactcactgctagccaccactggcgaggagtcatttcagccgcagaatttaagccataacgctgccactgacgactaagcgcttcctgaaattgcttatcgttaaaaataggttgactcataggagttccacttttcttagattttcaacacaacgttatcgctagtttgccaggctcgatgttgaccttcctcatcctgcgggggattaggcagggaggagttgcggggatgagcaaggaaatgtgatctcaaccacttaaagctagtgcaaaccacaggattagcatcaaatcaatgcaatacagcgcagaaaatctgtatctaagtgcaaaaaatggccgttgcgtattttcaaaaagcggaaggtaactctataaattaagtaaaggagtgaaacagtttcataagtaaaatatccagtgtgctccatctcattcttaatagatttattaagatcatctttttagatggcactttcatcaggaatgaagaagaaacccttgcttaaatgaatctgatgaacataagggaaaccagtattcacgctggatcagcgtcgttttaggtgagttgttaataaagatttggaattgtgacacagtgcaaattcagacacataaaaaaacgtcatcgcttgcattagaaaggtttctggccgaccttataaccattaattacgaagcgcaaaaaaaataatatttcctcattttccacagtgaagtgattaactatgctgattccgagtaaactaagtcgtccggttcgactcgaccataccgtggttcgtgagcgcctgctggctaaactttccggcgcgaacaacttccggctggcgctgatcacgagtcctgcgggctacggaaagaccaccctcatttcccagtgggcggcaggcaaaaacgatatcggctggtacagcctggatgaaggtgataaccagcaagagcgtttcgccagctatctcattgccgccgtgcagcaggcaaccaacggtcactgtgcgatatgtgagacgatggcgcaaaaacggcaatatgccagcctgacgagtctcttcgcccagcttttcattgagctggcggaatggcatagcccactttatctggtcatcgatgactatcatctgatcactaatccagtgatccacgagagtatgcgcttctttattcgccatcaaccagaaaatctcaccctggtggtgttgagtcgcaaccttccgcaactgggcattgccaatctgcgtgttcgtgatcaactgctggaaattggcagtcagcaactggcatttacccatcaggaagcgaagcagttttttgattgccgtctgagtagcccgattgaagccgcagaaagcagtcggatttgcgatgacgtttccggttgggcgacggcactacagctaatcgccctctccgcccggcagaatacccacagtgcccataagagcgcacgccgcctggcgggaatcaatgccagccatcttagcgattatctggtcgatgaggttttggataacgtcgatctcgcaacgcgccattttctgttgaaaagcgccattttgcgcagtatgaacgatgccctcatcacccgtgtgaccggcgaagaaaacgggcaaatgcgcctcgaagagattgagcgtcaggggctgtttttacagcggatggatgataccggcgagtggttctgctatcacccgctgtttggtaacttcctgcgccagcgctgccagtgggaactggcggcggagctgccggaaatccaccgtgccgccgcagaaagctggatggcccagggatttcccagcgaagcaattcatcatgcgctggcggcaggcgatgcgctgatgctgcgcgatattctgcttaatcacgcctggagtctgttcaaccatagcgaactgagcctgctggaagagagccttaaggccctgccgtgggacagcttgctggaaaatccgcagttggtgttattgcaggcgtggctgatgcaaagccaacatcgctacggcgaagttaacaccctgctagcccgtgctgaacatgaaatcaaggacatcagagaagacaccatgcacgcagaatttaacgctctgcgcgcccaggtggcgattaacgatggtaatccggatgaagcggaacggctggcaaaactggcactggaagagctgccgccgggctggttctatagccgcattgtggcaaccagcgtgctgggtgaagtgctgcactgcaaaggcgaattgacccgcagtctggcgctaatgcagcaaaccgaacagatggcacgccagcacgatgtctggcactacgctttgtggagtttaatccagcaaagtgaaattctgtttgcccaagggttcctgcaaaccgcgtgggaaacgcaggaaaaagcattccagctgatcaacgagcagcatctggaacagctgccaatgcatgagtttctggtgcgcattcgtgcgcagctgttatgggcctgggcgcggctggatgaagccgaagcgagcgcgcgtagcgggattgaagtcttgagctcttatcagccacagcaacagcttcagtgcctggcaatgttgattcaatgcagcctggcccgtggtgatttagataacgcccgtagccagctgaaccgtctggaaaacctgctggggaatggcaaatatcacagcgactggatctctaacgccaacaaagtccgggtgatttactggcaaatgaccggcgataaagccgccgctgccaactggttgcgtcatacggctaaaccagagtttgcgaacaaccacttcctgcaaggtcaatggcgcaacattgcccgtgcacaaatcttgctgggcgagtttgaaccggcagaaattgttctcgaagaactcaatgaaaatgcccggagtctgcggttgatgagcgatctcaaccgtaacctgttgctgcttaatcaactgtactggcaggccggacgtaaaagtgacgcccagcgcgtgttgctggacgcattaaaactggcgaatcgcaccggatttatcagccattttgtcatcgaaggcgaagcgatggcgcaacaactgcgtcagctgattcagcttaatacgctgccggaactggaacagcatcgcgcgcagcgtattctgcgagaaatcaatcaacatcatcggcataaattcgcccatttcgatgagaatttcgttgaacgtctgctaaatcatcctgaagtacctgaactgatccgcaccagcccgctgacgcaacgtgaatggcaggtactggggctgatctactctggttacagcaatgagcaaattgccggagaactggaagtcgcggcaaccaccatcaaaacgcatatccgcaatctgtatcagaaactcggcgtggcccatcgccaggatgcggtacaacacgcccagcaattgctgaagatgatggggtacggcgtgtaagtttagccggataacgcgccagatccggcttacatctctgcatcattcaatgctcacccgcgttacgccatctgtttctatcaaactaaaccgcaccggcaagaaacgctccaccaccgcgatattggtcagcagatggcaactgggatgggcgaccgtaaattcccccgcgcccgccagcgccatcggtagcaccagttggtcagcaagatattcccccaccgccgccgtgcttgccaggtagcgtttcacctctttcaccaactgtgccgcaaccacctcggcactgacgcgcttttcaccgacgacaaaaaagcgttcggtgatattttcactttcgacttcaaggctgacggtattacccggcccctggtcgcgcggcaggttatgaatattctgttcatgcagggaaaaactccccgccagtgtagcgatttcacgctcagcaacatggcgcggcacaccagctaatagaacttctccacgcatctgcacaatgttcccgcgctcgccaagttgcaaggtgttaaagcttgccacggggctgacttccgttgccaccacaccgcctccggcagggtaaaaaccgtggcgtaacagcgtggtttgctgatgaattcctattttcgccagcagcggctccagcacccggcggataaaatccgcaggcggcgcgctcgggttatcggtgccgccgctcacttcaacacggctaggtccatcggcaaaccacagcgcgggcagcaccgtttgcagcaccagcgtacaacttccggcgctaccgatagcaaagcggtaatcgccgccgcgcacggtgccgggccggaagagcagacgctggctccccagctccgcgccttccacggttgctccgcaaatttccgtcgccgcctttaccgcggtcagatgctggcgcaacagccccggtttcgcccgcccggcacgaatgctggtgatggtaaatggctggccggttatcatgctcaggctcagcgcgctgcgcaggatctgcccgccaccttcgccctgtgcgccatccagcgcaatcatccttttcatcatttatccttttacgcacaccacctgacgcagggtatagataacttccaccagatcgctttgtgccgccatcaccgcatcaatatctttatacgccatcgggatttcgtcgatcacttcggcatctttacggcattccacatgcgcggtggcacgaatttgatcttccacgctgaacagttttttcgctttagttcggctcattacccgcccggcaccgtggctgcagctacagaagctctcttcatttcccagcccacggacgataaagctttttgctcccatgctaccgggaataattccatattgaccagcacgcgcagacaccgcgcctttacgcgtcacgtagatctcttcaccaaagtgctgttctttttgcacatagttgtggtgacagttgatctcttccatcgccagcgtttgtggctgtctgaccgttttctgcgtaatgctctgcaatgccgttaccacgttttccatcatcgcatcgcggttaaggctggcaaaaagctgcgcccaggccacggctttcaggtaatcatcaaagtattccgtaccttccataaagtacgccagatcacggctcggcaacgtctcaagcgtttcctgcatctctttttgtgccagatcgataaagtaagtcccgatggcgttaccaattccgcgactaccggagtgcagcataatccacacctggtcgctctcatcaaggcagatttcaataaagtggttaccggttcccagcgttcccaggtgtttatagttattggtattcaggaaacggggatatttttgcgttaaccactgataaccggcttcaagctcagcccatttagcatcgacgttaacaggtggattttcccaggcacctttatcacgtttacaacggccagtggtacgcccgtgcggcacggccgtttcaatcgcctgacgcagctctgccaggttttcaggcaggtcttccgccgttaacgcggtacgcagcgcgttcattccacagccaatatccacgcccaccgccgccggaataatcgcccctttggtcgggatcacgctaccaatggtggaacctttacccaggtgtacatcaggcattaccgcaatatgtttgaaaataaacggcatcttcgccgtattaataagttgctgacgcgcatcggcctctaccggcacgcctttggtccacatttttaccggggcattttcagtggtcagtaattcgtaattcattttgtttttctcttttcgttgtttgctgtcctgataattgcaaccgtcgtgccagaaaattaaataagcagcttaattttttaattcattgttttaaaaaagattatatctttacgtccgtaaccggagatttcccgcaaagccaatttaccgataatgaaatatcgtcttttataaggatatctaagatgcgtaaaacagtggcttttggctttgtcggtaccgtactggattatgccgggcgcggcagtcagcgctggagtaaatggcgtccgacactctgtttatgccagcaagaaagcttggtcatcgatcgactggaattgttgcacgacgcccgcagccgcagcctatttgaaacgcttaaacgcgatatcgccagcgttagcccagaaacagaagtggtgagcgttgagattgaactgcataacccgtgggatttcgaagaggtctacgcctgcctgcatgatttcgcccgtggttacgagtttcagccagaaaaagaagactatttaattcacatcaccaccggtacccacgtcgcgcagatttgctggtttctgctggcagaagcgcgttacctgcccgcccggctgatacaatctagtcctccgcgcaaaaaagaacagccgcgcggcccaggtgaagtaacgattatcgatctcgatttaagccgttataacgccatcgccagccgctttgccgaggaacgccagcaaacgcttgattttcttaagtccggcattgccacgcgtaacccccacttcaaccgcatgattgagcagatcgaaaaagtggcgatcaaatcccgcgcgccgattctgcttaacggtccaaccggcgcgggcaagagttttctggcgcgacgcatcttagagttaaaacaggcgcggcatcagtttagcggcgcgtttgtggaagtgaactgcgccaccctgcgcggcgataccgccatgagcacgctgtttggtcatgtaaaaggcgcgtttaccggggcgcgggaatctcgtgaaggtttattacgcagcgccaacggcggaatgttgtttcttgatgagattggcgaactgggcgcagacgaacaggcaatgctgctgaaagccattgaagagaaaaccttttacccgtttggcagcgatcgccaggtgagcagtgattttcagcttatcgccggaacggtgcgcgatttgcgccagctggttgccgaaggcaaatttcgcgaagatctgtacgcgcggatcaatctctggaccttcaccctgccgggtctacgccagcgccaggaagatattgaaccgaacctggattatgaagtggagcgccacgccagtctcactggcgacagcgtgcgttttaacaccgaagcgcggcgcgcctggttggcttttgcgacctctccccaggcaacatggcgcggtaactttcgcgaactttctgccagcgtcacgcggatggccacctttgccactagcggacgcatcactctggacgtggttgaagatgagataaaccgtctgcgctataactggcaggagagccgcccctccgcgcttacggcgttgctgggcgcagaggcagaaaacatcgatctcttcgaccgtatgcaactggaacacgttatcgctatctgccgccaggcaaagagcctttccgcagccggacgccagctttttgacgttagccgccagggcaaagccagcgtcaatgacgcggatcggctacgcaaatacctggcgcgttttggtctgacgtgggaagccgtgcaggatcagcacagctccagttgaatatggtggtccgtcagcacctgcatcacgcttactggcggcggggcgtcggtgtagacggcatctaccatgctgatgctgcccatattgaccatcgcgttacggccaaatttcgagtgatcgacaaccagcataacgtggcgcgagttctcaataatggcgcgtttggtgcgaacttcgtggtaatcgaactccagcagcgagccgtcgctatcgatgccgcttatccccagaatgccgaaatcaaggcggaactgggagataaaatcgagcgtcgcttcgccaatgatcccgccatcgcggctgcgtaattcgccaccggcgagaatgatgcgaaaatcttcttttaccatcaacgtgttagcaacgttgagattgttggtgacaatgcgcaaattgctgtgattgagcagtgcgtgcgctaccgcttccggcgtggtgccgatatcgataaacagcgtcgagccattggggatttgctccgccactttgcgggcgatgcgctctttttcttcggtctgggtggccttgcgatcgtgccacggcgtgttaaccgaactggaaggcagcgccgcaccgccatgatggccaggatcaggttttgctccgccagctcattgaggtcgcggcgaatagtctgcgggctgacggagaaatgctctaccagctcttcggtactgacataaccctgctgtttaaccagttcgataataccgttgtgacgttgtgtttgtttcatttataaatccctggaattattttcgttttcgcgcattgaggctatcaacaaaagccatcgctaaacccacggctaacccggcgatgtgtgctccgttcgccatgctcatcccaaacaaatcaaaccatccggcgacaatccagatcagcgcaaagataattaacccacgttgcaggtaaatgccactttgcggatcgcgttcgccacgtagccagacgtagcccatcagcgcatacaccacgccagaaagcccgccaaaccacggcccgctgaatttttgctgcacatagccgcttaacagggcgctgataagcgtaatgacaattagcttaccgctaccgaggcgtttttccaccgcaccgccgagataccaccaccagagcaggttaaagaggatatgcatcaggctgaagtgcattaacgcgtgggtgaagtaacgccagaactcaaatttcagtgttggatcgaatggccaggccagccataacatcacttcctgatcgccgagaatttgcatggcaataaacaccaccacgcaggcgatcatcatcacccaggttaccggacctgcgcgttcacgcaaggcggcaaagaaaggataacggcgataatgcaggccactgccggtatggcctgcctgccagctcgccgccagataacgcggatctgccgggttttcgagaaaacgcgccagctccgcccgtacgcgctcggcctgggactcatccgccagccagacatcgctttggttatgttgttgaatcgtgaggataacaccctgcgtcgccatgtaatcaacaaacgcctgcgccacgcgggggttagcaaaagaggtaatcatcaacatcgttgctgtcgcttattccacacaaaaggggacagtataaagcgttacgcgccgtacgccacctctgcgggaaactgacgttgccaggcttcaaagccgccgtcaatgctatagaccacatcgtagccctgttgcagcagatactgcgccgcgcctttgctgctattgccgtgataacacatcaccatcaccggagtgtcaaagtcgttatcacgcataaaagcgcccagcgtgtcgttggttaaatggaaagcctgcaccgcatgtcccattgcgaaactctgtggatcgcgaatatcgaccagcaccgcctctttttcctgcaacttctggtgcgcgtcggcaacgttaatacattcgaactgatccatgcgtctctctttctttacaaacaagtgggcaaatttaccgcacagtttacgtcgaagcggcagataaacgccataatgttatacatatcactctaaaatgttttttcaatgttacctaaagcgcgattctttgctaatatgttcgataacgaacatttatgagctttaacgaaagtgaatgagggcagcatggaaaccaaagatctgattgtgatagggggcggcatcaatggtgctggtatcgcggcagacgccgctggacgcggtttatccgtgctgatgctggaggcgcaggatctcgcttgcgcgacctcttccgccagtagtaaactcattcacggtggcctgcgctaccttgagcactatgaattccgcctggtcagcgaggcgctggctgaacgtgaagtgctgctgaaaatggccccgcatatcgccttcccgatgcgttttcgcctgccacatcgtccgcatctgcgcccggcgtggatgattcgcattggtctgtttatgtacgatcatctgggtaaacgcaccagcttgccgggaagtactggtttgcgttttggcgcaaatagtgtgttaaaaccggaaattaagcgcggattcgaatattctgactgttgggtagacgacgcccgtctggtactcgccaacgcccagatggtggtgcgtaaaggcggcgaagtgcttactcggactcgcgccacctctgctcgccgcgaaaacggcctgtggattgtggaagcggaagatatcgataccggcaaaaaatatagctggcaagcgcgcggcttggttaacgccaccggcccgtgggtgaaacagttcttcgacgacgggatgcatctgcctagcccttatggcattcgcctgatcaaaggcagccatattgtggtgccgcgcgtgcatacccagaagcaagcctacattctgcaaaacgaagataaacgtattgtgttcgtgatcccgtggatggacgagttttccatcatcggcactaccgatgtcgagtacaaaggcgatccgaaagcggtgaagattgaagagagtgaaatcaattacctgctgaatgtgtataacacgcactttaaaaagcagttaagccgtgacgatatcgtctggacctactccggtgtgcgtccgctgtgtgatgatgagtccgacagcccgcaggctattacccgtgattacacccttgatattcatgatgaaaatggcaaagcaccgctgctgagcgtattcggcggtaagctgaccacctaccgaaaactggcggaacatgcgctggaaaaactaacgccgtattatcagggtattggcccggcatggacgaaagagagtgtgctaccgggtggcgccattgaaggcgaccgcgacgattatgccgctcgcctgcgccgccgctatccgttcctgactgaaagcctggcgcgtcattacgctcgcacttacggcagcaacagcgagctgctgctcggcaatgcgggaacggtaagcgatctcggggaagatttcggtcatgagttctacgaagcggagctgaaatacctggtggatcacgaatgggtccgccgcgccgacgacgccctgtggcgtcgcacaaaacaaggcatgtggctaaatgcggatcaacaatctcgtgtgagtcagtggctggtggagtatacgcagcagaggttaagcctggcgagctaaattaacgtaaggtgatcaggtcagatttcaatctggcctgagactgatgacaaacacaaaactgcctgatgcgctacgcttatcaggcctacgtggtttatgcaatatattgaatttgcatggtcttgtaggccagataagacgttcacgtcgcatccggcatgaacaaagcgcactttgtcaaaaatctaacctactttttaattcagggaattaccgcaaagcccacgccatcatacccaacgtaacaaaactcaggcacgttccccactcgcccgctgaaaaatagcattaatgcgcccagcgccagcataaaaattttgagcagaaggtaaattgttggcgtgataaggatattacaaacttcaataataccggcaagtccgacacccagcatggcaataaccaccgccaaaaattgcgccagtatggggatgccgaaaaaagtcattaccaggctggtcaaaatccattttctgttttgcattattctttccattctttttgaatggtgaaattatactccccgagtccccttgccccttctggacacttttccgaaatgatggcggaaaaaaacgggaccctttggccccgttctatttattggtgaacttacaatctcaccggatcgatatgccagatatgatcggcgtactctttgatagtacggtcagaagagaagtagcccatattggcaatgttcagcatcgcttttgcggtccactcttcctgaagctcgtagagttcatcgactttatcctgacaatcgacatagctgcgataatccgccagtacctggtagtgatcgccgaagttgatcaggctatcaaccagatcgcgatagcgacccggatcttccggactgaatacaccgctgccgatttgcgtcagcacctgatgcagctcctcatctttctcgtagtattcacgcggtttgtagccctgacgacgcagttcttccacttcttccgctgtgttaccaaaaataaagatattgtcagcaccgacatgatccagcatctcgacattcgcaccgtccaacgtaccgatagtcagcgcaccgttaagcgcaaacttcatgttactggtgccggaagcttccgtccctgccaggctaatctgttcagacagatctgccgccggaatgatcaactgcgccaggctaacgctgtagttcgggatgaacacgactttcagcttatcgccaatctgcggatcgttgttgatcactttcgctacgtcattgatcaaatgaataatgtgcttcgccatgtaataggcgctagccgccttaccgccaaaaatattcacgcgcggtacccacttcgcatccgggtcggccttgatgcggttatagcgggtaatcacatgcaacacattcatcaattgacgtttgtattcgtgaatacgtttgatttgtacatcgaacaacgcctttggattcaccaccacattcagctgctgggcgatatactctgccagacgctttttgttctccagcttcgcctgatgcacagcgtgattaaccattgggaaatcacagtgttgttgcagctcattaagcaggctaaggtcggtgcgccagttacggcccaggtgttcgtccagcacggcactaaggcttgggttcgctaccgccagccagcgacgcggcgtcacaccgttggtgacgttggtgaaacgacccgggaagattttcgcaaagtcggcaaacaagctttgcaccatcagattagagtgcagttcgcttacaccgttaactttgtggctcacaacaaccgccagccaggccatacgcacacgacgaccgttggattcatcaatgatgctcgcccgtcccagcagatcggtatcgttcggatactgttcctgcaaggttttcaggaaatagtcgttgatttcaaagatgatctgcaggtgacgcggcagaattttacccagcatatcaaccggccaggtttccagcgcctcgctcatcagcgtgtggttagtgtaggagaagacctgacaacacacctcaaacgcgtcgtcccagctaaattggtgctcatcgatcagcagacgcatcatctcaggaatgctcagtaccggatgggtatcattgagatgaatcgcgattttatccgccaggttatcgtaggttttatgcaactgataatggcggcttaaaatgtcctgaatggtgctggaaaccaggaagtattcctgacgcaggcgcagctcacgcccggagtaggtggagtcatccggatacagtacgcgagatacgttctcggagtggtttttatcttccactgccgcgaagtagtcaccctggttgaatttaccgaggttaatttcgctactggcttgcgcactccacaaacgcagcgtgttggtcgcgtcggtgtcgtaaccagggattatctgatcgtaagcgactcccagaatctcttcggtttcaatccagcgcgtttttttaccttcctgctgaatgcgaccgccaaaacggactttatagcgcgtgttgtggcgtttgaattcccacgggttaccgtattccagccagtagtctgggctctctttctggctaccgttaacgatgttctgcttgaacataccgtagtcatagcggatgccgtaaccgcgccccggcaaccctaacgtcgccagagaatcaaggaagcaagccgccagacgtcccaggccaccgttaccgaggcctgggtcattttcttcatcaatcagctcttcgagatttaaccccatcgcttccagtgcgccctgtacatcttcgtaaattcctaggctcaacatggcgttggagagcgtacggccaatcaaaaactccatgctcaggtagtaaacctgacgagtttcttggctcaactgggcacggttactacgtaaccagcgctccacgagacgatcgcgcacagcaaataacgttgcgttcagccattcatgtttattggcgacgaccgggtcctttccaatcgtaaacatcagcttgtaagcgatagagtgcttaagagcttctacgctaagcgtggggctactatatgtaaacggagcattcatataggcgtttcctgaaaattatttcaagcgatagtaaagctcacggtagctcttcgccgcgacctgccagctaaaatccattgccatagcctgacgttgcacaaaccgccacagactaggacgggaccacagtacaaaagcacgtcgaatagcccgtaacaggctccaggcattactatcttcaaagacaaacccactggcgacgccatctgcaaggttctcaagagaacagtcagaaaccgtatcagcaagcccaccggtgcgccgcactaacggcagcgtaccgtacttcaatccataaagttgcgttaagccgcacggttcaaaacggctgggcaccagaatgacgtccgcgccgcccataatgcgatggctaaatgcttcgtgatagccaatctgaacgcccacctgaccggggtattccgctgccgccgcaaggaaaccttcctgcagcaccggatcgcccgcgccgagtagcgccagctgcccgccctgctccagaagacccggtaaggcttccagcaccaggtcgagacctttctggctggtcagacggctcaccactgcaaaaagcggcactttatcgtcaaccttaagccccattgcgatttgtaactggcgcttattttccgctttatcttccaacgtatcgcgggtgtaacggctggccaacagtaagtccgtctctggactccagattttctcgtccacgccgttcagtacgccggaaagacgcccttcacggtgacgctgttgcaacagaccttccataccgtaggcaaactgcggttcggtgatctcgcgagcgtaggttggactgaccgccgtaatgtgatcggcatagtacagaccggccttcaggaaagagatttgtccgttgaattccagcccatgaatattaaagaaactccatggcaattggatgtcattcatgtgatgtgcataaaacatgccttgataggccaggttgtgcacagtaaacacgctcttcgccggacgcccgcgcgccgccagatacgcaggcgcaaggcctgcatgccagtcgtgcgcatgcaccacatcaggacgccagaatgggtcaagcccgctggccatttctgccccaacccaccccagcagcgcaaaacgcaatacgttgtcggtataggcaaataagttggtatcgtgatacgggcttcccggacgatcatagagatgcggcgcgtcaatcaggtaaatgccaaccccgttgtaatgaccgaacaacagcgtgatatgtccggcgaaggtatcacgacgggatactacctgcgcatcggtcacgccacggcgaatatcgggaaatgcaggcaacagtacgcgagcgtcaacgccgtctgcgatttgtgctgcgggtaatgccccaataacatcagccagaccgccggttttaagcagcgggaacatctcactacatacatgtaaaacctgcattatcgctcctgtttatgccctaacttccgtagcatttcgcgcgttaccagcacgatgccttcttcactacgatagaaacgacgtgcatcttcctctgcgttttcaccaatcaccatgccttccggaataacacaagcacgatcgatgacgcagcggcgcagacggcagctgcgacctacccatacttccggtaacaatacggcggaatcaatgttgcagaaactattcacgcgaacgcggctgaacagaacggactgcaccaccacgctaccggagatcacacaaccgccggaaaccagactgttaagggtcatcccgtggctaccggagcgatcctgcacgaatttcgctggcggtaaactttcattgtaggtgcgaattggccaattgcgatcgtacatatccagttccggcaccacagaggccagatcgaggttcgctttccagtaagcttccagcgtacccacatcgcgccagtacggctcggcatccgggtcggattgtacgcaagagagcgggaacgggtgcgcataggccagaccggcttcggtgatcttgggaatcaaatctttgccaaagtcgtggctggagttctcatcgcgatcgtcttcttccagcagttcatacagatagtcggcgtcaaagacgtagatacccatactcgccagagatttgctcggatcgttcggcatactcggcgggttagcaggtttttcaacgaattcgataattttatcgttctcatcaaccgccataacgccaaatgcggaggcttcttcaatcggtactggcatacaagcaacggtgcaacgtgcgcctttttcgacgtgatcgataagcatacggctgtagtcttgcttgtagatatggtcgcccgccaggatcaccacgtattccgctttataacggcggataatgtcgaggttttgggtgaccgcatctgcggtgccgcgataccagttttcccctttcattctctgctgtgctggcagcagatcgacaaactcgttcatttcttcattgaagaaactccagccgcgctgaatgtgctgcaccagagtgtgggactggtactgggtgatcacgcccatacgacggatcccggagttgatgcagttagacagcgcaaagtcgataatgcggaacttaccgccgaagtgtacggccggttttgctcgcttattggttaaatccttcaggcgggtaccacgtcctcccgccagtatcagggcaacagatttcaatggcagctggcgcgccaacattaagtgatcgttcttctctaaactaaccatgactaactccttttttatcatctctggaacacacacaatccgtgtgcaggtccctgccagacagccgtaatcactgggttatcctctccagcgaatgggggaatggcgtgccactccccagcaggtaaaacaatctctgttacctcaagcgtggcgttaattgcgatcaaaaagcgatcgctgagcagaatttgcagctgtttcggcccgttttgccactcatccgtgcttaaaggttgagcatatcgatttagccaacggacattgccgtcgccttcttcccaccagcgattctccaccaaagcgggaatgcgcttgcgcagatggattaacgcggcggtaaatgcggttaaaccactgcttgcctggctccagtccaaccaggttaattggttatcctgacagtaggcattgttattgccatgctggctgtgaccatgttcgtcaccggccagtaacatcggcgtaccctgggagagcaacaacgttgttaacagggcgtgaatgctgtcgcgccgccgttcaaccaggtcaagagaaccgcctaacccttctttaccatgattgttactgtaattgttgttggtcccgtcgcgattttcttctccgtttgcttcattgtgtttatggttgaagcaaacgcagtcgcgaagcgtaaaaccgtcatgcgcggtgacgagattaatcgcggcactcggcagacgaccattacgtttaaaaacatcgctggaggcagcaaaacgcccggcaaacgcccccagaggcaaatcataatgtagccagaaacgacgggcagcatcgcggaaatgatcgttccactcggcaaacagcggcgggaaatttcccacctgataaccaccaggagcgatatcccacggttcagcaattaacttcacctggctgagcaccgggcagttctggatagcggtaaacaacggcgcatcctgacggaactctggcgtacggcccatgactgccgccagatcaaagcggaaaccatcgacgtggcaggtttctacccaataacgcaggcaggcgctggcataatccaccaccgccggatgactcaaattgagcgtgttgccgcaaccggtccagttgtgataatcgccgtcttctcttatccaataatagctacggttatcgatcccacgcaggctgaataacgggccgtcgaggtccagttccgcactatggttgagcacgatatcaagaatgacttcgatacccgctttatgcagtgctttgattgcatcgcgaaactcatccagcgccgtttctgggctgcaggcatacgccggatgcagcgcaaacatcgccaccgggttgtaaccccagtagttacttagccccatgcgttgcagacgtggttcactggcaaactgcgccactggcagcagttccagcgcggtaatgcccaattgtttcaaatagttgatcatcaccggatgcccgagggctttataagtgccacggatctcgaccgggatctccgggtgcaagtacgttaatcctttgacatgggcttcataaatgatggtgctgccccacggcgtgcgcggcggggcatcatcttcccagtcatagtgatcaaccaccactacgcatttcggcgcaatggcggcgttgtcgcgatagtcaggttcattatgaccggcgtgcagcagcgggttatctttaaactccccgtcaatttgccgcgcgcaaggatcaatcaacaacttcgccgggttaaagcgatgcccctcggcgggttgccaggggccatgaacgcgataaccataacgcaaacccgggcgcgcatccggcagataaccgtgccaaatgtcgccactgtgccctggcaagtcatagcgatgttcctggccattggcgtcaaagacacacagttctacccgctcggcatgagcggagaaaagtgtgaagttgacgccctgaccgtcgtaatgcgcgccgaggggagcgggtttgccaatggcgagttgtgtcattctgcctcccgaaccagccagatagtggccagcggtggtagcgtcaggcttagactatgctgacgaccgtggctggcaatctcatcgctgtgtaccgtgccgccattgcctgcattactgccgtgatagtgcatggaatcggtattgaggatttcacgccatttgcccggctggtttatgccgaagcgataatcatgacgcggtaccggcgtaaagttactggcaacgatgatttcgttaccctctttatcgcgacgcacaaagatcagcacgctgcgttctttgtcatccaccaccagccattcaaagccgtacgggtcaaaatccagttcatgcattgctttatggtggcggtaggtgaggttcagatcgcgcaccagacgctggacaccgtggtgccagttatcgccgccttccaacagatgccagtcgaggctggcgtcatggttccactcgcggccctgggcaaattcgttacccatgaacagtagtttcttgcccgggaatgcccacatccagccatagtaggcgcgcaggttcgcgaatttctgccatgcgtcgcccggcatgcggtcgagaatgctttttttaccgtggaccacttcatcatggctcaacggcaggacgaagttttcagtgtagttgtagagaatcccgaaggtcagtttatcgtgatgatactgacgataaaccgggtcgagcttcatgtagtccagggtgtcatgcatccagccgaggttccacttgtaccagaagcccagaccgcccatatcctgcggacgagaaacgccagggaaatcggtagactcctcagccattgtcaccgcaccggaaacctgctcaccaagaatacggttggtattacgcaagaattcaatcgcttcaagattctcgcgcccgccaaattcgttcgggatccactccccctctttacggctgtagtcgcgataaatcatactcgccaccgcatcgacgcgcagcgcatcaataccaaaacgttcaatccagtaaagcgcgttaccgacgaggaagttactgacttcacggcgaccatagttgtagatcagcgtgttccagtcctgatgatagccttcacgcggatcgctgtgttcatacaagttcgtgccatcaaattcggcaagcgcaaagtcatcagtcgggaagtggcctggcacccagtcgagaatcacgttcagaccagctgcgtgtgcggcatcaatgaaataacggaagtcgtcgcgagtaccaaaacggcgggttggcgcatacaggccggttggctgataaccccaactgccatcgaagggatgctcgttaatgggcagtagttcgaggtgggtaaagcccatccatttagcataaggcaccagttgatcggccagctcgcggtagctcaaccagaaattgttgtcggtgtggcgacgccaggaacccaggtgaacttcataaatagagattggcgcatcaaactgattcgcttttttgcgctcttcagtctgtacaaccttttccggcagcccgcaaataagagacgcggtttccgggcgcatttgcgcttcaaaggcataagggtcggacttcagacgcaagttgccattggcatcaatcatctcgtatttatagagctgaccgttatgcgccccagggataaacagttcccagatgccgctctctttacgcaggcgcatcgggtgacggcgaccgtcccagtagttgaattgcccaaccacgctgacccgacgggcgtttggagcccagacagagaaacgcgtacctgtgacgccatccatagtatctgcatgcgcgcctaaggtttcatacgggcgcaggtgagtaccttcagataatagccaggcatccatttcctggattagcggaccaaaacggtaaggatcatcaatcaggttttgctgaccatgccagacaacagccaactgatagcggaaaaaattcttacgtcgcggaatgacgccgctaaagaatccccgactgtcgagacactccagttttgcgagtttgcgcccggttttcggttcaatcacccacacatcggtagcgtcgggtaaaagggcacggacttccagtcccgcggtggttttatgcattcccagtacggaaaaaggatccgcaaaatggcctgcaattagcgcgttaatcacgtctctatcgatacgatcggacatgcttgtcttcctgttttattgtgtcaccccatccaattggatttttgacttctggttgtgacatttttttgacctgaacggcgcagcactctgtgcatcctctctgcgtcgtcctcacttcaggtaaggctgtgaatactcatgtattcagccacccttaaagaatagccaatgctctatttaactcccggtaaatcatgaaacatctgcgcttactcctgtattacgcactaacaggggcggcatcgcgccccagatttaatgaataaagattacgccagttgacgaagcatccgacgcagcggctccgcggccccccacagcagctggtcgcccacggtaaaggcactcaggaactctggtcccatattcagcttacgcaggcggcctaccggcgtggtcagcgtgccggtaacggcagctggggttagctcacgcatagtgatttcccgatcgttcggaacgactttcgcccacggattgtgcgcagccagcagttcttccacggtcggaatagacacatcttttttcaatttaatagtgaatgcctggctgtggcagcgcaatgccccgacacgcacacataaaccatctaccggaattacggaagatgtgttgaggatcttgttggtttccgcctgccctttccactcttcgcggctctgaccgttatcgagctgtttgtcgatccacggaatcaggctacccgccagcggcacgccaaagttatccaccggcagctcaccgctacgggttaaggttgtgactttgcgttcgatatcgagaatagcagaggacggggtcgcgagttcatctgccacatggccatacagatggcccatctgggttaataactcacgcatatgtcgcgcaccaccgccggaagcggcctggtaggttgcaacggacacccaatcaacaagatcattggcgaataaaccacccaagctcatcaacatcaggcttacggtacagttaccgccaacaaaagtcctgatgccattatttaatccgtcggtaatgacgtcctgattgacggggtcaagaatgatgatggcgtcatctttcatgcgcagagagcttgctgcgtcaatccagtaaccttgccatccgctttcacgaagctttggatagatttcgttggtataatcgccgccctgacaggtcacaatgatatcgagggcctttagcgcctccagatcaaaggcatcctgaagtgtgccagtggttccgccaaaagacggcgcagcctggccaagctgagaagtagaaaagaagacagggcgaatggcgtcgaagtcgcgctcttcaaccatgcgttgcatgagaacggagccgaccataccgcgccagccgataaaaccaacatttttcataagcgtttttttcctgcaaagatgtgtgctgtataaatgtgccggtctcctcttggcacatctttcaccatacaaaaagcagccaaagtcgcaagtgaaattaatcaatgatagcgaagccatcagtaatgcgacttatcctgctttgttagcacgcagaaagtccgcggcaattatcagggaatttgagttatgaatgaaatcatttctgcagcagttttattgatcctgattatggatccgctcggaaacctacctattttcatgtccgtactgaaacatactgaaccgaaaagacggcgggcaatcatggtgcgagagttgcttattgctctcctggtgatgctggtgttcctgtttgcgggtgagaaaattctggcatttcttagcctacgagcagaaaccgtctccatttctggcggcatcattctgtttctgatcgccattaaaatgattttccccagcgctagtggaaatagcagcgggcttccggcaggtgaagagccatttatcgtgccgttggcaattccgttagtcgccgggccgactattctcgccacgctgatgttgttgtctcatcagtacccgaatcagatggggcatctggtgattgctctgctgctggcctggggcggcacctttgtcatcctgctacagtctagcctatttttacgtctgctgggcgagaaaggggtgaacgcacttgaacgcctgatgggattgattctggtgatgatggcaacccagatgttcctcgacggcattcgaatgtggatgaaggggtaacgaggagagtttttcgaaaagaacccggtagcgtcacaactaccgggcgaacaaacttaactcaacagctggaacgcaatcatcccaacgatggcaccgacagtgccgaggatggtttccatcatggtccaggttttcagcgtttcggcttcggtcgcgccggtaaatttaccgaacaaccagaaaccggcgtcgttaacgtggctgacaacaatgctaccaccagcgatacaaatgctcagcgccgccatttgcgcaccggagtagttcagttgttcaataaccggcatcaccagtcctaccgccgttaaacaggctacggtggcagaaccctgaatgatgcgcactgcagctgccagcacgaagcaggtgatagcaatcggcaggcccatgccggttaacgcttcgcccagtgccggacctacgccagagtcaaccagcacctgtttgaacacgccgcccgcaccaatcaccagcagaatgatccccgccggttgcagcgcgtgaccgcaaatctccatcactttgtcttttggcatgccctgacgcattgccagaccgtaaatcgccaccagacaagcaaccagaatcgcggtaaacggatgaccgataaactcaaaccattcgtaagcagtacttccttccggcacaaaacgcgcggcaatggttttcagccctaccagcaccagcggcagcaggatcaggctcaggctgaatccgaaagatggcattttgccttcgccgagatgcggttcgctgatgtcgtcaggaatatgcagctcaacgtaacggctgatgaagttaccccacagcggcccggcaataatcattcccggaattgccgcacacaggccaatcaggatcatccagccaaagtcggcattcatctggcttgccagcagcatcggcgctggtccaggcaccagaaatgccgccgctgccgccacgcctgcaaataatgggattaccagcttcaccaggttcgtaccggtgtggcgcgccatactgaaagcaacgctaatcagcagaactatcgccacttcaaagaacagcggtagcgcacagaccagccccgcaaggccgatggcataatgcgcgcggctgtgaccgaaggatttgagcattttgacggcaatctgatcgactgcgccggtttcatgtaagatcttgccaaacatagctcccagggcgacaaccaccgccaggaagccgagggtgcctcccatccctttttccatcgtcgctgcgattttatcgagcggcataccagaaaaaaggccagcccccatggacaccaccattaaagccaggaaagcgtgcatacgcgccttcatgactaaaaacagcagcagtaaaacagaccctactgctgttaaaacaagcgttaatgtagtcactacttatttgccttttttaataacctcaatggtgcttgccacaacaccttccagcggttgatcgatatccaccaccagtacatcggtttcgtccgcacccggctcctgcagcgtttcaaactgcgtcaccaacatttgggttttaaagaaatggcctttgcgcgctttcaggcggctttcaatcacatcaaaatcgcctttcaaatagatgaaagagagattcggattaccttcacgcagcaagtcgcgatagtgttttttcaatgcagaacagacgatcaggctcactttattagtgcgctgcatagcaaacgcggcgtcgttcagcgcctgcaaccacggtttgcgatcgtcgtcattcagtggttcgccagacgccattttttcgatattgcgccgtggatggaggaaatcgccatcaagaaacgcggcatgaagttgatgcgccacttcactggcgaccgcagatttgccgctgccgcttacgcccatcaagacgtaaatgtggtgatcatggttagtcgtgctcaaagtggtgcccccacaatacaagaattaaaaatgttacgggtaactgttatcggtaacattgtccagccggacaatatcagaagcaatatccatccatgccttaagtgtataagtgtgagctacttcaaatttgtgggcttaaatagatccgcccggactcaaggtgaaacctaaatctaacattttcggtgtcacagattcgccacgaatacgcgccagcaggcgttcagcgccaatactgcccatccgctcacgcggcgtcagcacgctcgcaagtcgtggctccatcacctgaccaatgtcatgaccgtggaaaccggcaatcgccatatcgtcaggaacttttaaccccagacgctgacattcaaacgccgcgccgaccgccaggtcatcattcgtacagaacacgccatccagctgcggatattcccgccgcgcctggcgaatcagttcaataccggaagagtaagaagaagattgctcaaccatcacgctatatggcaccaggcctgcatccagcatcgcctgttcgtatcccttctgtttgatgatagtacgttcgtcgagacgtgcgccgagataggcaatgtggcgatgcccgcgagcaataatggcagtggtcatctggcgtgctgcttcaaagttatcaaaaccgacggcgatatcaaggcatgggctcttgctgtccatcagttccaccacgggaatacccgccacttcaatcatctttaaggtgcgcggcgtgtgggtacgttcggtgaggatcaggccgtcgatattccaggagagcatggattcgaggcgttcttgctccatttccggtttataaccgtagtgcgccagcatggtctgataaccgtgcgcgtcggtgacgctttcgattccgcgtaatacttccgcgaaaacctggttggtgagagaaggtaacaggacgccaatcgcccggctggtggcgttagagaggatatcgggcgcacgattgggaatatagcccagttcatcaagagccgcggcaatcttgccgcgtagagcgacggaaacctgctccgggttgcgtaaaaaacggctgaccgtcattttggtcacgcctacacggtcagccacatcctgaagtacgggtcttttctttttcatcgtcctgaaggtacaaaagagatagattctcttagtttaacacggacacatcagaaccttcccggggaaaacagtgcttgtttacaattattagatatacactaaatcaattgcatcgcattgtgctaacgacgcggcaaaaccccggaagcgtacatcagcacgcgaccggagcgagcgaggaagcctgcaaaaaggcaggcttcaaagatgccgttgagttttaaaccggcggcagatcgaacagtaacacttcgctgtcgctatccgcatggatggagattgcctgctcatcccagattgccagaccatcgctggtgctggctttcacgccgttaatggtgacattgcctttcaccacctggatccagacgcggcgttcagcggcaatctgatgcacgctctgctcatctttcagcaacgcccagcggtacagttccatatcctgatgcactttcaaactaccatctcgcgcatccgggctgagcaccagctgtttgccctgtacggcatcgaagcgacgctgttcataacgcggcgtaataccgttttcttcaggcatgatccagatctgatacagatgcagacgctcggtgctgcttgggttgtactcactgtgacgaatacccgtaccagcactcataatctggaactcacccgccggaacctgctctttattgcccatgctgtcctgatgctcaacagtaccttccagcacgtaggtcaaaatttccatatctttatgcgggtgagtgccgaagccctgccctgcttcaatcacgtcgtcgttaatcacgcgcagcgcggagaagcccataaagttcggatcgtaatagttggcaaaagagaaagtatgccaggagtccagccagccatgatttgcatgaccacgttcatttgctttgcgtaagtagatcatttgtattcgccccctgaatgatttcgatgggcttagtgtggacccgatctgcctgggatgatagagggtgaaaattgacccctctgttcaaaaaaattgaactattcgaggggccatcaaacttacttagcgagagttactgtggagggagaggcttgctcaaatccgcgttcaaggatttccagattggtaagaacttcagattccttgacgtaatttggcgcaccgtgggtgatggtttgatacaacgcatcataaacgcgcccgtaatcgcccatctccggcttcatctcttctctgaccgtcacgccctcgtcattgacatactccagcacaccgacgctatcatccgctgcgaatcccggttcgcccggcataatattagccttcaggctggtttcctgctggtcgataccgtatttaataaagctacctttcttaccgtgaacgataaatttcggataatcgattttcaccagatggctggttttgacgatggctttcaggtcgccataaaacagttgcgcttcaaaggtgtcgtcaggattggctttattacgcaggctgcggatgtcataagcgacgtgatccgggcgaccgaacagagaaataatctggtccatcgtatgcacaccaaggccataaaacgcgccatcctgcggcagcccaggtttggtttctgccaccgggcggtaatagtcaaaatggctttccacttcaacaatctctcccaacttgccactttcaatcgcttttttcgctgtcaggaagcaggagtcaaagcgacgattctgatacggcgtgacggtcagccctttgcttttcgccaacgcaaacagctctttcgcctgcgcaagtgtcggagtgaacggtttttcgaccagcacatttttcccggcttccagcgcgcgtttcgcgtactcgaaatggctgtccgcgtgggtgcagacaacaaccagcttaacatcgggatcgtttagtacttcgtcgagatcgctggtgaaatggatatgggaataaatgggagcctgttcttccggcttcgcatggcgacgaaaaatatgcgcgacatgccagctatccttgcggttaagtacatacggcagatggtaacgggtggtgcttttgccgaagccaataaaggcgcagttgatgaccatgatttcgtcctttttaaggtggttatttacaccttagcgcaaagcggacgtggttcctactggagtgcgcataacgaacacaagcactcccgtggataaattgagaacgaaagatcaaaaaaaaagccagcacccggctggctaagtaatactggaagcaatgtgagcaatgtcgtgctttcaggttctccgcgagggtcttcctgatcgcgagacaataataatcattctcattcgcacttgtccaacactttttgcaaaaaaatgcatttgactcgcatttgaaagtcaatgatgttgaaagggacatttaccccaaagaggacaaaggaacaaatgctcttcccacgaagagggccgctaaccttagtaccccgccgttaaatcatccacgctgcgcgggtcggatgcgccgtacaactcaccgtccggcccaaccataatgctttgtgtactgcccatcgcctctttcagcgccactttctgaccttttgcttccagcagcttgagcgtatccgggctaaaccctttttcgacacgcagctcgtccggcaaccactgatggtggaaacgcggcgcattggtcgcttcggcgacgttcaagccataatcgatgctattcaccaccatttgcagcactgtagtgatgatccggctaccgcctgggctaccggtaaccagccaggttttaccgtctttcaccacaatggtcgggctcatgctgctcagcgggcgtttgttcggcccgacggcgttggcatcaccgcccaccagcccgtaaacgttcggtacgcccggtttggcggagaaatcatccatctggttattaagcagaataccgctctcgcccgcgacaatgcccgtaccgaaggtggtgttcagcgtataggtcaccgccaccgcgttaccatctttatccaccacactgtaatgggtagtttgattactctcataaggcgcaagcttgccggggcgaatttcgctggatggcttcgctttattgatatcaatttgatcggcaatagatttggcataggctttattggtcagcgcctgccacggtactttgacaaaatccgggtcgccaagatattcgctgcggtcggcgtaggcgtatttctccgcttctgccatgatttgcatcgcatcggcgctgccaaagccgtatttcttcatatcgaagttttccagaatattgaggatttgtacgatatggatcccgccggaggatggcggtggcatggagtaaacctgatacccgcgataatcgccgcttatcggagtgcgttcgaccgctttataggctgctaaatcttctttagtgatcaagccaccgtttttctgcatctcctgggcgatctgttccgcaatcgtgcctttatagaattcgtccgggccgttttcagcaatcatctccaggctctttgccaggttcgcctgcaccagcgtgtcgccctttttcagcggctcgccctctttccagaagatagctttactgttttcgtgattcggcaacacttcgctaccgtaggttttgagatcgtcagccagcgcgtcgttaacgataaaaccatcgcgtgccagtttaaacgcgggctgcacgactttgttcagcggcatggtgccgtatttatccagcgccaggctgaaacctgctaccgtacccggtgtgccggaagccagatggctagtgagactttttttgctgtccgggttgccctgatcatcgaggaacatatcgcgggtcgctttggcgggtgccatttcgcggaaatcgatagccgtggtattgccatttttgctgcggattaacataaaaccaccaccgcccagattccctgcctgcggatgcgttaccgccagcgcgtagcccaccgccacggcggcatcaacggcattcccgccctccttgagaatatccacccccacctgagtggcagtggcgtccacagacgctaccattccctgtttcgcgcgtaccgggtggaagacatcttcctccacaccatagctgacgggcggcgcaggaggcgcggcggcggcgctaaaacaacttccactgagcagagcagcaatggccacccggcgtaaaaacgtcggttttatcatcgttattctccagagattaaggggcaaccccagctaagcctggtatataactctgaattaatcatcgttttgtcgggaagcgagtaaacttaaaggatatcttcagaggaggatacgcgatgaaacgacttctgattcttacggcactcctgccgtttgtcggctttgcacagcccattaatactctgaacaaccctaaccagccggggtatcagatacccagccagcagcggatgcaaacccagatgcagactcagcaaatccagcaaaaagggatgctgaatcagcaactgaaaacgcaaactcagttgcaacagcagcatttagaaaaccagataaacaataattctcagcgggtgttgcagagtcagccgggggagcgaaatcccgcccggcagcaaatgctgcccaacaccaacggcgggatgttaaacagcaaccgtaatccggatagtagcttgaatcagcagcatatgctgccggagaggagaaacggcgacatgctgaatcagcccagcacgccgcagcctgacattccgttgaaaactattgggccgtaattattgggccgtaaagttcggaccaatcacgtcaatcgcatcggtacagatgcaatccacaccccagcgcagcaactctgctgcgcgctggggtttattgacggtataaaccagaatccgcagtccggcgtctttcaactgcatcactcgcgctttattgagtaacttatgattgagatgaatagagacgcagcccagccgcgcggtcagttcgcgccagtcgtcgcgccactcatccagcaacaaaccgcgcggcagttccggtgccgcctgttgtgcagcttctaaagcatcaatctcaaagctactcagcagcggcggcgtcataccggcccacagctcgcgtgccgccagcgccaccattttgcccgttaatggcccggtgccggtggtgggtttgatttcgatattcgccatcatcccgtgttcgcggcaacgttccgccacctggctaagcaacggtagcggctcacctttaaacattttgctgtaccaactgcccgcatccacgcgcagtaaatcctgccagttcagttcacccgcgacgccccagccgttgctggtacgttcgagattgtcgtcatggagcaggaagatctcgccatctttgcttaacttcgcgtcaaattcgatcatcttatgaccgtattttgccccgacgtcgatactcgccagggtgttttccggggccagcttaccgccgccacgatgagcgacgatgcggggataaggccagttactcatactcgttgtcctgtttcaccatcaaaaagatgcagctgattttccgccagatgcagccacagcgtgctgcctgccgtcgggcgctcctgatgcgccagtcgcaccaccagcttctgctcgccccagcgtccgtgcgccaggttatctgcgccgaggatctccagcgtgtccatcaccatcggtacgccgccttctgcctggctgcttagcgcaatatgttccgggcgaatgccgagagtcattttacgcccggcatactgacggtagccaccgtttagcggcagctcaataccgccgtccagttcgaaatgcgtgccttcgttattcacgcggcctgtcagcaggttcatcgccggactgccgataaaactcgctacaaacaggctggcgggcttttcgtagacttcaactggtgtgccaatctgttcggcaacaccgccgttcatcaccattactcgctgggcgagcgtcatcgcttcaacctgatcgtgagtaacgtagagactagtcgttttcaggcgacggtgcaactgttgcagttcaagacgcatctgcacgcgcagcttggcatcgaggttagagagcggctcatcaaacaggaacaccgccggatcgcgcacaatcgcgcggcccatcgccacacgctggcgctgaccgccggaaagctcgcgcgggcgacgtttgagcagaccgtccagctccagaatgcgcgccgcttctttaacgcgctcggcaatttgctgcttgcccatgccgcgaattttcagcccccacgccatgttttcttcgacactcatatgcggataaagcgcgtagttctggaacaccatcgcaatcccgcgatcttttggctccatttcagtcacgcgctggtcgttgatccagatatcgccttctgtcacccgctccagcccggcaaccatgcgcagcagcgtgcttttcccgcagccagacggcccgaccatcacgataaattcgccatccgccacatcaagggtcagcggtttaatgacctgggttttaccatcccagcttttggttactgcctgtaatttcagtcctgccatcttatttctcactatcgaccaggccgcgcacgaaggcacgctgcatcactaaaacaatcaccaccggagggataagcgttaacaacatcgccaccatcacactgttccattccgtggtgccttcgcctgtagcgatcatccctttgatccctgccacggtggtgccgagatccacatcggtaataatcaacaacggccacaaatactgattccagccgtagataaaggtgatcacaaacagcgccgccagattagttttggagagcggaaaaacgatgtcgcaaaagaagcgcattgggcttgcgccgtcgatccgcgcggcttccaccagctcatccggcagcgtcataaagaactggcggaacaggaaagtagcggtcgcgctggccatcagcggcagcgttaaaccggcgtagctgtcgagcatctgcaggttggcgatgacttccaccgtcgggaagatacgtacttcaaccggcagcatcagggtgataaaaatcatccagaagaagaggttacgtagcggaaaacgaaaccagacaatggcaaatgcgctgagcatgctgacggtaattttgccgagcgtaatgctgaacgccatcacaaagctgttaagcaacatccgccagaacggcgcgctattcgtgcctaccccgttcacccagatgttgtggatgttttccagcagatgtgtgccggggatgagcgtcatcggcgcggcatagacggcctgtttatccagcgtcgccgcgacaaacgccacgtacagcgggaagaggatcaccgcgatcccgaggatcagcatggtatggctgaatatcgtcagccacggacggttctcaatcattggtaacgcaccttgctttcaacatagcggaactgcaccaccgtcagcacgatgacgaggaacatcaacaccacgctctgtgcggcagagctagccagatccagtccggtaaaaccttcgcggtagatcttataaatcagcgtcgtggtggcctgaaccggcccgccggacgtggcggcgtcgatcaccgggaaggtgtcgaagaaggcatacaccaggttcactaccagcaggaagaaactcaccggggcgataagcggcagcgcaatcttaaagaagcggcgaatcggccctgcaccgtcgatggctgcggcttcgatcaagctacggggaatggattgcagcgcggcatagaagaacaggaagttgtagctgatttgcttccatacactggcaaacaccaccagaaacattgcctgaccgctgttttgcgcgtggttccagtcgtagccgaactccgcgagaaaatgggtgatcagcccgcgaccggggttaaacaggaagatccacaatacggcggcaacggcgggagccacggcgtaaggcagcaacattaaggtttgatagaaacggctgccgcgcacgatgtactccaccagcgccgcaaagaacaggcttaccagcaaaccgctgacggtgacaaaggtgctgaattttatcgtcgtccagaaggagtcgagatagtagctgtcatggaacagcgtgacgaagttatccaggccgacaaactggctggagaaaccaaacggatcgacgctttgtaggctgtaccacaacgcttcgcccgcaggccagataaaaaagataacggtgatgatgagctgcggcgcgaccagcagataaggcagccagcggctgcggaacaccggacgggaactactcattacggttaattcctgaactgtgccggatgcgcttcgcttatccggcctacacgcgatgccaggtcagataagcgaaacgcatccgacattacactgattaagacttcgtgcttttctcaaagcggcgcagcaactgatttccacgctcaacggcggtatccagtgcctgctgtggtgtcttcttaccggtccacacgctctccagctcttcatccacaatcacgcggatctgcggcatgttgcccagacgcagccctttggtgaacggcaacggcggcttattcagcatctgacgcgtcgcggtatccgcccctgggtttttctcataaaagccctgctcacgggtcaggtcatacgctgctttggtgattggcagataaccggttttctgatgccactcggcagcgttttctggcttcgcgaggaaatcgaggaacttcgccacaccggtatacgtttctttatctttaccctgcatcacccacaggctggctccgccgataatggcgttttgtggcgcatctttcgcatcggcgtcgtaaggcatcatgcctacgccgtagttaaatttggcgtactcgcgaatgttggcaagagaaccggaagaggcggtggtcatcgcgcaatcaccgttatagaacttctcggtggattcatccttacgaccgacgtagctgaagtcgcccttcttgttcatctcctcgagcatggcgatgtgtttcacctgctccggcttattgaactccagcaccgcgtccgtgccgtcaaagccgttgtttttgctggcaaacggcagaccgttccaggcgctaaagttttccagttggatccagccctgccagccgctggcgtagccgcacttcatgccggaggctttcagtttcgcggcatagtccgccagatcctgccaggttttcggcggctgttccgggtctaatcctgctttcttgaaggcgtctttgttgtaatagagaacgggggtgctgctgttgaatggctgggagagtaagtggcccgttttgctgtcggagtagtaaccactaaccgtcggcacaaactggctctcatcgaactgaatccctgcctctttaaacacgtcatacaccggtttaatggctttgctcgccatcatggtggcggtgccaacttcataaacctgcaaaatagccggcgcgttgccggtacgaaatgcggcaatccccgcgcttaaattctgttcgtagttgcctttataggtcggtacaattttgtaatccgggttttcggcgttaaaacgttgggccagagaatccacctctttacccagttccccttccatagaatgccagaacggaatggtcgtcactgcctgtgcattccccattaacgccagtccgagcgccagtgcactagctgtataatgtaacggtttcatcgtttatctctcttgttgtaccgaatgcgcgaattcacgcgttttatgctcgcggggtaacatgacatgctcgaattacagaaaaataacttttttgttacatttgtaagatagtaaggtgtcagaaagatgacaaggcggtgacggcgtgggtgagggaaaatgggagatggggcacggataagcgggaaaatatagaaggtctgaatcaaactctacagattgctcatcgtttcatgccggatgcggcgtaaacgccttatcaggcctacaagatcgtgcaaattcaacatattgccactcacccagtaggcctgataagcgcagcgcatcaggcaattttacatttgtcacctgtctcaaaggagtcttttgactccctatcaatcaacgtgttattacccgcctaaatacgcacttctcaccgcttcattcgccagcagcgcatcaccagtatcggaaagcactacatggccgttttccagcacgtagccgcgatccgccagctttagcgcctggttggcgttctgctcgacgagaaagatagtcatcccctgctcgcgcagctgctcgatggtgtcgaaaatttgctggatgataatcggcgcaagaccgaggcttggctcatcaagcagtagcaaacgcgggttgctcatcagcgcacgaccaatcgccagcatctgctgttcaccgccggacatggtgcccgcccgctgaatacggcgctcatgcagacgtggaaacagctcatacacccactttatgcgctcctggaactggtcgcgttcagcaaaaaaaccgcccatcgccaggttctcttccaccgtcatccggctgaagacgcgacgcccttccgggacaatcgccaccgcttcgcgcatgattttcgctgtctgccagtcggtaatgtctttatcatcaaacacaattcgcccgctggtggcacgcggatcgccgcataacgtgccgagcaaggtggttttccccgccccgttcgcgccaatcagcgtgacaatctcgccctgattgatatgcaggctcacctcatgcagcgcctggattttgccgtagtgggcgctgactttgtcaaaggacaacatgactttttccatcttatgcctcacctaaataggcacggatcacgtccgggttattacggatctgctccggcgtaccgtttgccagcggcgtcccctgattgaccacgtaaattcggtcgctaattcccatcaccagcttcatatcgtgttcaatcaacaagatagtggtgttgtgatgattgcgcagttcggcaatcagctcatccagctctttcgtctctttcgggttaagacctgccgcaggttcgtcgagcattaaaatctccggctgcgtcaccatgcagcgggcaatctcaagacggcgctggtcaccataggccaggttactcgcctgacggttggcgtgttccagcaaaccaatgcgctcaagccaggtcgcggcgcggtcgagcgcttcgctctgggcgcgacggaaggatggcgttttcaacaggccagagaacagcccggttttcagttgctgatgctgcgccaccagcaggttttcaattaccgtcatttcacggaacagacgcacatgctggaaggtgcgcaccacgcccatgcgggcaatttgctgccccggtaaaccttccaggtgctgatcgcgcagtaaaatggtgccgccggtgggtttgtagaatccggtcagacagttaaaaaccgtggtttttccggcaccgttagggccgattaagctgacgatctcctgcgggtacagttcaagattgacgttgttcaccgccagcaggccgccgaagcgcatcatcaggccgttaacagataataatggctgactcatgcctgctctcctttcgctgcgccgtttttcagcttcagttgcgggcgcgtcatgggcagcaagccctgcggacgccagatcatcatcagcaccatcaaaccaccgagcattaacatgctgtattcgttgaaatcacgcatcaactcgcggctcaccaccagcaaaattgccgccagaatcaccgcaaattggctgcccataccgccgagcaccactatcgccagcacaaacgcgctttcggcaaaggtgaaggattccgggctgacaaagccctgacgcgccgcaaacagcgttccggcaaaaccggcaaacgcggcacttatggtaaaggcagtcagcttgatacgacgcgggcttaagcccaggctacggcaggcgatttcatcttcacgcaacgcttcccacgcacgccccagcggcatccgcagcaggcggttaatgacaaacaggcttagcaccaccagcagcaacgccaccaggtagaggaagatgacacgatcggagggatcgtatttcaggccaaagaaattactgaacgtgtcccagccgccttcacgagcggtacggctgaactcgagtccgaagagtgtcggtttcgggatctgactgattccgttcgggccgccggtaatttcggtgttattgagcagcaatatgcgcacaatttcgccgaaaccgagggtaacgatcgccagatagtcaccgcgcaaacgcagcaccggaaaaccgagcaggaagcccgccgccgctgccattaatccagcaatcggcaggcaggtccagaagcccaagccgtaatagtgattgagcagcgcaaaagtgtaagcgccgatggcgtaaaaaccgccgtaccccagcaccagcagaccagaaagaccaacaaccacgttcagcccgagaccgaggataatgtagatcatggtcagggtggcaatatccaccgtcccgcgactaaccataaacggccacgccaccgcaagcaccaacagcgccacgaggaacagtttctgcttcaccgtggagccatcaatggcgggcagaataaacttcggtccggaaacgcttttcaaccctttctggaaagccggtcgcaaaagctggaagaaaaagaccaccgccgtgccgataaacacccactgccaacggacatcgctagccgtgtcgaccaccagtttggtgccatccagctccagttgcacgcccataaagacgcccgccagcacaaagaacatcgcggcagagagcagcgccattgcaatatgcatcggtttcatactttctctacctccgggcgacccagaataccggtcggcatcaccagcagcaccagaatcagcagggcgaaactgaccacatctttatattccgtactcagataggcagaagagagcgcctccgcaatccccagaatcaggccgccaatcatcgctcccggaatgctgccaatcccaccgagcaccgccgcggtaaaggctttcatcccggccataaagccgatgtaggggttaatgacgccgtagaactgaccgagcagcacacccgccaccgccgccatcgccgcgccaatcacaaaggtcagcgcaatcacccggtcggtgttaatgccaagcagactcgccattttcagatcttccgcgcaggcacgacacgcgcgacccatgcgggaatagcgaatgaaaatcgtcagcgccagcatggcgaggaaggtaacaatccagatcaccgcctgcatggtggtaatagaggcagagaagttttcgctatgccccaccacccactgaccgttaaacaggctcggcagcgccacgtcgcggctaccttcggtcaggctgacgtagttttgcaggaagatggacataccgattgcagagatgagtgcaatcaggcgcttagagttacgcaccgggcggtaagccacccgttcgatactccagccgtaggcgctggcaatgacgattgcgccgacgaatcccgcagctaccagcagccagccggtatcaatgcccatcatcatcagcgcggcgatgatcataaaactgacgtagctgccaatcatataaacctcgccgtgggcgaagttgatcatgccgataatgccgtaaaccatggtgtagccgatggctatcagcgcgtaggtactgcccagcgtgacgccgttaaacatctgctgcaagaaatacaaaaactgctcagacataaggtaacctttctaaacccgcccgcattttacgggcggtgggatgatcacttggctgccgtggaactaccgtcggcgtgccactggaagacaccaaaatcaaatcccttaagatcgcctttttcatcccagttcagcggcccaatcacggtgtttgcaccgttagcttttaaatctttcaccagcgccagcggctcatcgctgccggtacgctcaagggcagtcgccagagattgcaccgccgcgtaggtgatccagacataaggcccggacggatctttcttgtctgctttcagcgcatcaacgatgccctggtttgccggatcctggtcatagcgttttggcatagtgaccaacatgccttcggcggcatcaccggcaatgttgctcaagctcgcattacccacaccttccggccccataaactgggttttcaggccaacggaacgggcctggcgcagcatctgccccatttccgggtagtaaccgccgtagtaaacgaagtcgatgttttcttttttcaggcgggcgatcagcgcggagaaatctttctccccggcggtaataccgtcgaagaagacgacgttggcgttagccgctttcagcccgtcctgcacgctacgcgccagcccttcgccatactgttgtttgtcgtgaatgatggcgatgcgctggggcttcaccgtctcaagaatgtattttgccgccgttggcccctgggaagagtccagcccggcagtacgcataatgtgttgataaccgcgttgggtcagctccgggttggtcgctcccgggctgatcatcagaataccttcgtcttcatagatatcactcgcaggctgggtagaagaagaacacagatgaccaataacgtatttaatgccgtcattaacgattttgttggcgaccgcaacggcttgtttcgggtcgcatgcgtcgtcatattccacgccaaccagtttatcgcccttaattccccctttggcattaatgtctttaattgcctgacgcgcgccgttaaattccatatcgccccactgggcaatcgggccggacatcgcgccgacaacggcgactttaatatcgtcagccatagcggtgtgactaattgccagtgcaatcatccctgcgatgatagttttcgcattccgtttcatagtcaaaaatccccattcgtgatgttgtgttgctttgtttttatgtgttaacaaatcagactgttctttttttatactgcactgtttttgcctgtctgattaaggggttagcgcagtattttgtgataatagcgattaaaatccctatttttcagtcgattaagaacagataatattctgaatttattgatagataaacagaaaaaagtgcctttgtcagcataaaataacggcacaaagggcggaataattcactatcattcaggggattatgctggacatttttcattctctaatgttttaattttgtaattattgctgttaaaaaattaatcacctgccaaaagaaataaaaaagagaaagcctccgattaaattatttcgctacactggttccacttttgtgatttacacgggttacccatgaagctgaccatcattcgattagaaaaatttagcgaccaagaccggattgacctgcaaaagatctggccggagtattccccttccagcttacaggttgacgataaccaccgtatctacgccgcgcgttttaacgagcgcctgctcgctgccgtgcgggtaaccttaagcggcaccgagggagcactggattccctgcgcgtgcgggaagtcacccgccgtcgcggtgtggggcaatatctgctggaagaggttttgcgtaacaatcctggcgttagttgctggtggatggcggatgcaggcgtggaagatcgcggtgtgatgacggcgtttatgcaggcgctggggtttacggcacaacagggcggctgggagaagtgttaatcgtcaagtttgatttcaaaagtgatattgcctgatgcgctacgcttatcaggcctacaatgtgtgttgcaatttactgatttctttggatcttgtaggccggataaggcgtttacgccgcatccggcatgaagcaacgtactcgatattagcaatttggcggcaacccaaagttgccgattaatgattacttcgcatcggtcgccgtgccgttggcgtgccagtcaaatacgccgaactcaaagcctttcagatcgcctttctcatcccaggtcagcggtcccattacggtatccacggagttcgctttcaggtatttggcgatttcagccggatcgtcagactgattcaggcccgcctgcaaagattgcagcgcggcgtaggtggtccaaacgaatgcgccacttgggtcctgttttttcgctttgatcgcgtcaacaatgggtttgttcgccggaacctgatcgtagttcttcggcttggtcaccagcagcccttccgcactttcgcccgcaatgttagacaggctaacgttagccacaccttccggccccataaactgagttttcagccctgccgcgcgtgcctgacgcaggatttgccccatttccgggtgataaccgccgtagtaaacgaagtcgatattctcttttttcagacgcgccaccagcgtactgaaatctttttccccggcggtgatgccatcaaagaacaccacgtttgcattgcctttcttcaggccgtcctgcaccgctcgcgccagaccttcgccgtattgctgtttgtcgtgaacgatagcaatacgctgcggtttcactttctcaagaatatatttcgccgccgtcggcccctggtcggagtccaggccggtggtgcgcaggatcagctgatagccacgggcggtcagctccggcgcggttgccgctggggtgatcattaaaatgccttcgtcttcgtagatgtcagacgcaggctgcgtactactagaacagaggtgaccaatcacatatttaatgccgtcgttaacgactttgttcgccaccgcaaccgcctgtttcgggtcacaggcatcgtcatattttacgatttgcagtttgttgcctttaatgccgcctttagcgttgatatccgcaaccgcctgctctgcgccggtaaactcctggtcaccgtactgcgcaaccggaccggacattgcgcccacgaccgcgactttaatatcttctgccagagccatattgctgaatgccagcgcgatacatcctgccagtaacgctttaccctttatgttcatcctgagaatccccattcttctggttattacgtgtgttgtgatgttgtttttcagcactttatttcgttttatgcatgactacccgtgctttagcagcatactctgctaaaacatacccgatttttatgatattggaatagctattttgacagtttattaacaatctgcgtggggattggcgttttgccggaggggaaattgattattacagaggcccaaaaaacaaaaaccccggactctcatccagggttctctgcttaatagcggaaattacgcttcaatggcagcacgcaattttttcatcgcgttcttttccagctggcgtacacgctcagcggaaacgccgtaacggtcagccagttcctgcaacgtggacttgttgtcttcgtccagccagcgcgcacggatgatgtcctggctgcgttcgtccagaccctgcatcgcgtcggtcagacggtttgccgcctgctcttcccagttatcatcttcaatgccgtcggcaaagttagaacttttatcctgcagatagagcaccggagccatcggctggctgtcggaatcgtcgtcggaagacaggtcaaaggtcatgtcctgtgccgccatacgactttccatctcacgtacgtctttgctggttacgcccagttcacgggccaccatttcgacttcatcctggttaaaccagcccagacgctgcttggttttacgcaggttgaagaacagtttgcgctgcgctttggtggtcgcaactttgacgatacgccagttacgcagaacgtattcgtggatctctgctttgatccagtgaacggcgaaggagaccaggcgcacacccacttccgggttgaaacggcgcactgctttcatcaggccgatgttaccttcctgaatcaaatccgcctgtggcaggccatagcccgcataattacgagcaatatgaacaacaaaccgcaggtgagacaggatcagcgttttagctgcttccagatcgccatggtaatgcagcttttcagccagcgcccgctcctcgtcagcgctcaacatcggccacgcgttagctgcccggatgtaggaatccaggttgccaactggggctaaagctaaactttgcattttgtcagtcattcaaatcctctcaatcgatatcttctggcgcttcagtggtagcaacaactgtgccagagcttaagagcaacgaggttatcattcactgttttatcagaccgtgattttatccacaagttcaatgcaagcttgtgaataaattacgcacaaaatgtgacatagagatgaaataccgggaagagacaacggggtctctttccctgctacggaacccattgcagggaaagagtataacacgcttttattattcaggcgtaaagtggcgtaaatgttgtaccgtggcaagccacgctgccacccagccaatcatgctgcataccagcagcaatagcaggcattcatcgaaacttaagccattgatatcaaacttcgttccgaaaacctgtgccacttccgcaaccgcgctactcaatcgcagcaccagaatttcactcaaaattaaactcaacaatgcgccagaaaatcccagcagtgcgccaccatacaggaacgggcgcaggatgaatccatctgtcgcaccaatcagtttctgtacgttaatggagtcacggcgagcaaagatactcagacgcacactgttaccgatgacgaggaacacggccgccaccatcaacacgccgatcatcgcgctaacgcgcccgaccagcccggtcaacgccgccagacgggcaaaccagctgtcatccatccgcacttcgtcaatgccgttaatctgcgtgatacgatcacgcagcgtattcagactttccgtcccctggaaatcgagtttcgggatcaccaccgccactgccggaagcgggttttcttccagcatatccagcgcaccaccaaaaccagaccagttacggaactcacccagtgcgtcttcacgagaaagatagttcactttctccacgccttgctcggcctgcaactgtgccaccacgcccgcagcagcgtcatcgtccagcgttttttgcagataaacagtgatttgcggactcggataatactgcgtcgccgcctggttaacgtttttgtacaccatataacagacgctgggcagcgtcagagaaatggcgataaccatcaccgttaaaaacgtggcgaacggtttgcttttcagatcctgcaatgcgccgtggaaggcatagcgcacctgttcgttgaaaacgttggttttgcgatttaccggttttgggctggatttcgcgcgttttggtgcgttacgaccgccgtcgccactgccgccgacgcttttacggaagcgatcaagacgcccgccaaactgccgaatatgattgattgcatcgcgcttattcatggcccacgcctccatgcaagtgaccatcgctcagggtgagcatgcgataggaacgccggctgatcaggttgatgtcgtgcgttgccatcaatacggttaccccaacgcggttaaactcttcaaacagacgtaaaatgccttcgctcagcgcgtcgtccaggttaccagtcggttcgtccgccagcagtaccgcgggcttgttcaccaccgcgcgggcaatgccaacacgctgttgttcaccgccgctaagctgaatagggaagttcttcgctttgtccagtagcccgactttatccagcgccgcgctcacccggcgacgaatatcgtcaccgctggcaccggcgataatcagcgggatcgccacgttatcgtagacagtacggtccatcagtagatggtgatcctggaaaatcatgccaatctggcggcgcagaaacggaacttcacggtttttcagacgcgtgatgtcatggccgctaaaccagattttcccggcgctgggccgctcaatcccacagatcagcttcaggagggtacttttccctgcgccggaatgaccggtcagaaacgccatctcacccggctgcatatggaacgtaacgccctgcagcgcctgtctcccaccgagataagccttgctgacatgttcaaagcgaatcattgttaatcctctcgggcaaaaagtgcctctataaagtcgtccgccttaaacggacgcaaatcctcaatacgttcgccgacaccaatgtagcggatagggataccaaactggtcagccacgctgaaaattaccccgcctttcgccgtgccgtccagtttcgttagcgtgatgccggttaagccaacggcttcatggaacagtttggcctggcttaccgcgttctgcccggtgctggcatcaatagtcagcataacttcatgcggcgcttcaacgtcgagtttcttcatcacgcggacgattttcttcaactcttccatcaggtggcttttgttctgcaggcgtccggctgtatcggcaatcaggacgtcgatattacgcgctttagctgcctgaatggcgtcgaagataacagaggcggaatccgccccggtatgctgggcaatcaccggaatattgttgcgctgaccccagacctgaagctgttcaaccgcagctgcacggaaagtatcacccgccgccagcatcacgcttttaccctgctgctcaaactgacgcgccagcttaccaatcgtcgtggttttacccacaccgttgacgcccaccatcaggatcacaaacggcgctttgccttcaacattcagcggctcatcgactttcgccagaatctcgcccatctcttctttcagcaggccatagagcgcctcggcgtcacgaagctgcttgcgggatgcgccttccgtcagattggtgataattttacgtgtggtttccacacccacatcggcgatcaaaagctgctcttccagctcctcaaacagatcatcgtcgatttttttaccgcggaacaggctgataaatccggaaccgagattttctttggtttttaacaggctgcgtttcaggcgcgcgaaaaaaccttctttggtcggtttttcctgctcctgagcgatttcttccaccggctgctcttcttctgccggaggaaccaccatcaccgcctcttctgccgcttcggcagccagcgccgtttccagctcttcgtcggtaatttcttctttagccgcttcttcttccgccgcttcgacaatctctacggtttccgcttcagcctgccactcttctgggctaaccgcttcggcgttgacgtcttccggcaacggcagctcttcacgttcgatagccactggctccggcgtttcttctacgaccggttccggctgtgcaacgacttccgcttcaggctgcgctttttcactttcagcaacctgttcagtgacttccacaacgtcggcagcaaaagtttccgcctcggcttcagtatgcgcttgcggctgctcttcaacggcttgttcagaggccttcacaggctcttgcgcctgaacgatttcttctacaaccggttgttcattctgaacttctgtctctttttccggggtctgctctttttgaccaaagcccagccaggaaaaaaagccacgttttttttctttcgccatttgcgactacactcctcgctgttgcttcatggcacagcgttaacgctatgtacatagcagctaaaaaaatgatgaaatagtctatcacttaacttaattcacatcaccgcctgcaagtatgtgttatctggcggattgagcaatttatcatgaaaaaaccgaatcattccggcagcggccaaatccgcattattggcgggcagtggcgaggccgtaaactcccggttcctgatagcccaggtctgcgccccaccaccgaccgcgtacgcgaaacgttgtttaactggctggctccggtcattgttgacgcccaatgtctggattgcttcgccgggagcggcgcgctggggctggaagcgttaagccgctacgctgcgggggcaacgttgattgagatggatcgcgcggtttctcagcagttaattaagaatctggcgacactaaaagcaggcaatgcacgcgtggtgaacagcaacgcgatgagtttcctggcgcaaaaaggtacaccgcataatatcgtgtttgtcgatccaccgttccgccgtggcttgttagaagagacgataaatttactggaagataacggctggctggctgacgaagccctgatttatgtcgaaagcgaagtcgaaaacggtctgcccactgttccagcaaactggagtttacatcgggaaaaagtggcgggtcaggtggcttatcggctgtatcaacgcgaagcacaaggagaaagtgatgctgattaatattggtcgtttgttaatgctctgcgtttggggatttttaatcctcaacctggtgcatcccttcccacgcccgctgaatatcttcgttaacgtggcgctgatttttaccgtgctgatgcatggtatgcagctggcgctattgaaatccactttaccgaaagatggcccgcagatgaccaccgccgaaaaggtacggattttccttttcggcgtgtttgaactgctggcctggcagaagaaatttaaagttaaaaaataaccttattgttcgcctacaaagctgacaaagcgcgttcctttatagctcagcgtacctttatcgcccactgtcagggcgtggtactgctgggcgtcgaggcgaaacgtctgctccattcctccgctttgcggtttgaagcttgcctcatagcgtatactggtgcctgccggagtcacttcctgctggcggctacggcgatcgttaatcggtttttcccgcttgttgctcaccaccaccagcttttgctggagcggagccatatcattatcagctttttcccgtcgctgttgcataaaacgaaagcttgcggcgacgacaattaagccaatgataacaataaagaaaagaggtggtttgctcatctttatccctcatcggaaaatgcggaaataagcataccctgccagttatggtgttgtcatccgtccaccctcgccactaaactggaagcaagaccgtaggcattccgcttacgaaaaaataacgaattcaaggaactaagatgctttggagctttatcgctgtctgtctttccgcatggctatctgtggatgcaagctatcgtgggccaacctggcaacgctgggtgtttaaaccgttaacccttcttctcctgctgttactggcctggcaagcgccgatgttcgacgccattagctatctggtgctggcagggctgtgcgccagtctgctgggcgatgcgctaaccctgttgccacgtcaacgtctgatgtacgccatcggcgcgtttttcctcagccacctgctgtacaccatctatttcgccagtcagatgacgctctctttcttctggcctctaccactggtgctgctggttctgggtgcgctgttactggcgattatctggacgcgcctggaagagtaccgttggcctatctgcacgtttatcggcatgacgctggtgatggtgtggctggcaggtgaactgtggttcttccgtccgaccgctccggcgctctctgcgtttgttggcgctagcttgctgtttatcagtaactttgtctggctggggagccactatcgccgacgcttccgtgcggataacgcgattgctgcggcctgctactttgccggtcacttcctgatcgtccgcagcctgtatctctgataaaacttgactctggagtcgactccagagtgtatccttcggttaatgagaaaaaacttaaccggaggatgccatgagcactcctgacaatcacggcaagaaagcccctcaatttgctgcgttcaaaccgctaaccacggtacagaacgccaacgactgttgctgcgacggcgcatgttccagcacgccaactctctctgaaaacgtctccggcacccgctatagctggaaagtcagcggcatggactgcgccgcctgtgcgcgcaaggtagaaaatgccgtgcgccagcttgcaggcgtgaatcaggtgcaggtgttgttcgccaccgaaaaactggtggtcgatgccgacaatgacattcgtgcacaagttgaatctgcgctgcaaaaagcaggctattccctgcgcgatgaacaggccgccgaagaaccgcaagcaagtcgcctgaaagagaatctgccgctgattacgctaatcgtgatgatggcaatcagctggggtctggagcagttcaatcatccgttcgggcaactggcgtttatcgcgaccacgctggttgggctgtacccgattgctcgtcaggcattacggttgatcaaatccggcagctacttcgccattgaaaccttaatgagcgtagccgctattggtgcactgtttattggcgcaacggctgaagctgcgatggtgttgctgctgtttttgattggtgaacgactggaaggctgggccgccagccgcgcgcgtcagggcgttagcgcgttaatggcgctgaaaccagaaaccgccacgcgcctgcgtaagggtgagcgggaagaggtggcgattaacagcctgcgccctggcgatgtgattgaagtcgccgcaggtgggcgtttgcctgccgacggtaaactgctcagtccgtttgccagttttgatgaaagcgccctgaccggcgaatccattccggtggagcgcgcaacgggcgataaagtccctgctggtgccaccagcgtagaccgtctggtgacgttggaagtgctgagtgaaccgggagccagcgccattgaccggattctgaaactgatcgaagaagccgaagagcgtcgcgctcccattgagcggtttatcgaccgtttcagccgtatctatacgcccgcgattatggccgtcgctctgctggtgacgctggtgccaccgctgctgtttgccgccagctggcaggagtggatttataaagggctgacgctgctgctgattggctgcccgtgtgcgttagttatcagtacgcctgcggcgattacctccgggctggcggcggcagcgcgtcgtggggcgttgattaaaggcggagcggcgctggaacagctgggtcgtgttactcaggtggcgtttgataaaaccggtacgctgaccgtcggtaaaccgcgcgttaccgcgattcatccggcaacgggtattagtgaatctgaactgctgacactggcggcggcggtcgagcaaggcgcgacgcatccactggcgcaagccatcgtacgcgaagcacaggttgctgaactcgccattcccaccgccgaaagtcagcgggcgctggtcgggtctggcattgaagcgcaggttaacggtgagcgcgtattgatttgcgctgccgggaaacatcccgctgatgcatttactggtttaattaacgaactggaaagcgccgggcaaacggtagtgctggtagtacgtaacgatgacgtgcttggtgtcattgcgttacaggataccctgcgcgccgatgctgcaactgccatcagtgaactgaacgcgctgggcgtcaaaggggtgatcctcaccggcgataatccacgcgcagcggcggcaattgccggggagctggggctggagtttaaagcgggcctgttgccggaagataaagtcaaagcggtgaccgagctgaatcaacatgcgccgctggcgatggtcggtgacggtattaacgacgcgccagcgatgaaagctgccgccatcgggattgcaatgggtagcggcacagacgtggcgctggaaaccgccgacgcagcattaacccataaccacctgcgcggcctggtgcaaatgattgaactggcacgcgccactcacgccaatatccgccagaacatcactattgcgctggggctgaaagggatcttcctcgtcaccacgctgttagggatgaccgggttgtggctggcagtgctggcagatacgggggcgacggtgctggtgacagcgaatgcgttaagattgttgcgcaggagataaggcaaaccgatcgcaacattgagcgcgatcggtcccctcgcccctctggggagagggttagggtgaggggaaaaggcggcatcgaagccaatcagcccctatcaaccgcctttacgaatcaaataacgataaggcagtccatccgtctctttagcaaccagttcgtgttccataaaggtacaaaacccaggaatatcgcgggtagtggccggatcgtcggcgataatcagcaacgtttcgccaggctgcatattgcgcacggttttgcgcaccatcatcaccggttccgggcagcgcaggccaagcgcgtcgagtgtgtggtcagggctggaaaagagatcggtcattttcttctcatcacttaaaaaaacggcgctagtttacgccctgtgagtccgtaagcaaactaggttaacgattgcgtgaaaattaaccattgcattgtcaacgtaaagcagtatcatgcggcggctcgaaaaaagggtaagcacgttattatgttaaggtaacagacgtgtcgtacgtattgggttccctcaccccaatggttaatcaaaaaggtacaatatgaacgttttcagccaaactcaacgctataaggcgttgttctggttaagcttatttcatctgctggtgatcacctccagtaactatctggttcagcttcccgtctccattttgggtttccataccacctggggcgcgtttagctttccgtttatttttcttgctaccgacctgaccgtgcgtatttttggcgcaccgctggcccgacgcattatcttcgcggtaatgatccctgcgttattaatctcctacgtcatcagcagcctattctatatgggttcctggcagggattcggcgcactcgcccacttcaacctgtttgtcgcccgtatcgccaccgccagtttcatggcctacgcgctggggcaaatcctcgacgtgcacgtttttaaccgcctgcgtcagagtcgccgctggtggctggcaccgacagcgtccacactgttcggtaacgtcagcgacacgctggcctttttcttcattgccttctggcgtagcccggatgcctttatggctgaacactggatggaaatcgcgctggtcgattactgtttcaaagtgttaatcagtatcgttttcttcctgccaatgtatggcgtattactcaatatgctgttgaaaagactggcagataaatccgaaatcaacgctttgcaggcgagttaaaggttcgttatcagagttgtgataagatggatgaatgagccgttatggccgtttatcgaaaggaagaagtcaatgcgcaatctggttaaatatgtcggaattggcctgctggttatggggcttgcggcctgtgatgataaagacactaacgctacggcgcagggtagcgtcgcggaaagtaacgctaccgggaatcccgtcaacctgcttgatggcaagttaagtttcagcctgccagcggatatgaccgaccagagcggtaagctgggaacgcaggccaataacatgcatgtctggtccgacgccaccgggcagaaagcagtcatcgtcatcatgggcgatgatccgaaagaagatctggcggtgctggcgaagcgtctggaagatcagcaacgtagccgcgatccgcagctgcaagtggtaaccaataaagccattgagctgaaaggtcacaaaatgcagcagttagacagtattatctccgcgaaaggccagacggcgtactcttccgttattctgggtaacgtgggtaatcaactgctgaccatgcaaattacgctgcccgctgacgatcagcaaaaagcgcagaccaccgcagaaaacatcattaatacgctggttattcagtaagttttaagaactactggcggcctcagggacgtgttccggaggccgtttttttaatcgccacgtcagtaataacgcgattgcgaccagtcccgccgccgccagataaatcaccggtacgcccgcccagctcatcaccagcccagccagtggtccagtcacgccaaggcttaaatccataaatacggtgtaagttgccagcgccgccccctgattttgctgcggaaccgcttttaccgccactacacccaatgccgggaacaccaggctaaacccggcccccgccagtaagacgccgattttcgccatccacggcatagtcgccacgccaaccagtagcaggccgattatctcaacgctaaagcaaatcatcgctacgtttaagccaccgatacggttaatgccgttagggaataacaaacgcgtaccgacaaacgcacagctaaacagcgtcagcgcgaaagccgcaccgtcccaacctttagcgtcataaaacagcgtgataaaggtggcgatgacgccaaatccggcggaagccagtgccagcgccataccgtacagccagacgcgcccaagcaccgcgcgaaacggcagcggtttgcctttactggcttttaccgtcggacgcgggatcgccaacaaaatggccaccagcgccacgcccataatgattaacgctaacgcctgcaagccgccccagtgataaaacacgacgcctaacggcgcacccatcgccatcgccccgtaagtgacaatgccgttccagctaatcacccgcccgatatgcaggctgccaaccacgccaacgccccatagggtgcttcccgttccggcaaaactttgcccaatcccaaggatgacgcgccccaggcaaagtaataacaggctgatgacaggcagactggcggttaatcctgccgtcagataccccagaccgctcaaaaagcagccgcataaaccgaagacgacaatctttttgggtcccaggctatcggcgtaacgtccggcatgagggcggctcagcaaggtggcgaaatattgcaggctgataaccaatcctgcccagaaggcgctaaagcccatcacatcatggacatagcccggtaatacagcgagcggcaacccgatggtgaggtagctggcgaagttaaacatgactatagagacaatgcgcaaattcaggcgcaatccgtttagcgcgggttcggctacgggttcgggcatgaggatcaccacatttttacaacagtgtttcatttttaccacgtgctgacgtgaaaatcagcagtaagaatcagaatattgctggcgtgactcccgctacacttaatacaaaaagtcacaaggaagccccaatggaaacccctcaacccgataaaacgggcatgcacattctgctcaagctggccagcctggtagtgatcctcgcgggcattcacgcagcggcagatatcattgtgcagctgttactggcgctgttttttgccatcgtcctcaacccgctcgtcacctggtttattcgtcggggagtacaacgccccgttgccattacgattgtagtggtggtgatgctgatcgcactaaccgcgctggtcggcgtactggcggcaagctttaacgaatttatctctatgctgccgaagtttaataaggagctgacgcgcaaactttttaaattgcaggagatgttgccttttcttaatttgcatatgagcccggagcgaatgctgcagcggatggacagcgaaaaagtggttaccttcaccacagcgctaatgaccgggctttccggggcaatggcgagcgtgcttttgctggtgatgaccgtagtttttatgctgtttgaagtgcgccacgtcccttacaaaatgcgttttgcgctgaataatccacagattcacatcgcgggattacaccgcgcacttaaaggcgttagccactatcttgcattgaagacgctactcagtttatggacaggtgtcatcgtctggctggggctggagctgatgggggtgcagtttgcgctgatgtgggcagtactggcgtttttgctcaactacgtgcccaatatcggcgcggtaatttccgccgtaccgccaatgattcaggtgctgctgtttaatggtgtttacgaatgtattctggtcggcgcattgtttttagtggtccatatggtcatcggcaatattttagaaccacggatgatgggccatcgcctggggatgtccaccatggtggtatttcttagtttgttaatttggggatggctgctcggcccggtagggatgctacttagcgtgccattaaccagcgtgtgtaaaatctggatggaaaccaccaaaggcggtagcaaactggcgattttactggggccgggcagaccgaaaagtcggttaccgggatgaggcgacaagtgatacgatacgcactttcattttccattaaacgttggccctgatatgtatcggatagttctggggaaagttagcaccttaagcgcagctccactgccaccgggtttacgcgagcaagcaccgcaaggtccacgacgcgaacgctggctggcggggcgtgcattgcttagccacacgctttccccgctaccggagatcatctatggcgaacaaggcaaacctgcatttgcgccggaaatgccgctatggttcaacttaagccatagcggtgacgatatcgccctgctgttgagtgatgaaggcgaagtcggctgcgatatcgaagtgattcgcccgcgcgccaactggcgctggctggcgaacgccgtattcagcctcggggaacacgctgagatggacgccgtgcatcctgatcagcaactggaaatgttctggcgcatctggacgcgcaaagaagccatcgttaaacagcgtggcggcagcgcctggcaaatcgtcagcgtagacagcacctatcactccagcctgagtgtcagccattgtcagcttgaaaatttaagccttgcgatctgcacccctactccctttacgctcaccgccgacagtgtgcaatggatcgatagtgttaactgatccgcccacccgactgcccatctattgatccagaacaggtaatcagtatgacgaatacttaaaatcgtcatacttatttccgccatctattttaatccattggggttaccatgctctccacactccgccgcactctatttgcgctgctggcttgtgcgtcttttatcgtccatgccgctgcaccagatgaaatcaccaccgcctggccggtgaatgtcgggccactaaacccgcacctttacacgcctaaccagatgttcgcccagagcatggtttatgaaccattggtgaaatatcaggcagacggtagcgtgatcccgtggctggcaaaaagctggactcatagtgaagatggtaaaacctggaccttcaccctgcgtgatgacgtgaaattctccaacggtgaaccgttcgatgccgaggcggcggcagaaaacttccgcgcagtgctcgataaccgtcaacgtcacgcctggctggagctggcaaaccagattgttgatgttaaagcactcagtaaaacagagctgcaaattaccctgaaaagcgcctactatcctttcctgcaagaactggccctgccccgtcctttccgttttatcgctcccagccagtttaaaaaccatgaaaccatgaacggaattaaagcgccgattggcaccggaccgtggattttgcaggaaagcaaactgaatcagtacgatgtcttcgtccgtaacgaaaactactggggcgaaaagccagcgattaaaaagatcacctttaacgtcatcccggacccgactacccgcgcggtggcgtttgaaactggcgatatcgacctgctgtacggaaacgaagggttattaccgctcgataccttcgcccgctttagccagaatccggcttaccacacccaactgagtcagccgatcgaaaccgtgatgctggcgctcaataccgccaaagcccccaccaacgagctggcagtacgtgaagctcttaattacgcggtaaacaaaaaaagcctgattgataacgcgttgtatggcacccagcaggtcgccgacaccctgtttgccccttctgtgccctacgccaacctcggcctgaaaccgagccagtacgatccgcaaaaagcgaaagcgttgctggaaaaagccggttggacgctgcctgcgggcaaagacatccgcgagaaaaatggtcagccgctgcgcattgaacttagcttcatcggcaccgatgcgttaagcaaaagcatggcggaaatcattcaggctgatatgcgccagattggcgcagatgtcagcctgattggcgaagaagagagcagtatctatgctcgtcagcgcgacggtcgttttggcatgattttccaccgcacctggggcgcgccatatgatccacacgccttcctcagtagtatgcgcgtaccgagtcacgctgacttccaggcacagcaaggattagccgacaaaccgctgattgataaagagatcggcgaagtgctggcgacccatgacgaaacgcaacgtcaggcgctgtatcgcgacattctgacccgtctgcatgacgaggcggtttatctgcctatcagttacatcagtatgatggtggtaagtaaaccggagctgggtaacatcccctacgcgccgatcgccaccgaaattccgttcgaacagattaaaccggtgaaaccttaatgttgcgttacgtattacgccgctttctgctgctgatcccgatggtgctcgccgccagcgtgatcatttttctgatgctgcgcctcggtaccggcgacccggcgctcgattatttgcgtctgtctaacctgccgccgacgccggagatgctggcctctacccgcaccatgctgggactggatcagccgctgtacgtccagtacggcacctggttgtggaaggcgctgcatcttgactttggtatcagtttcgccagccaacgcccggtactggacgatatgctgaacttcctgcccgccacgctggaacttgcaggtgcggcgctggtattaattctgctcacttccgtaccgctcggtatctgggcggcgcgccatcgcgaccgtctgccggatttcgccgtacgtttcatcgcgtttcttggcgtgagcatgcctaacttctggctggcgtttttactggtgatggcgtttagcgtgtatctgcaatggctacccgcgatgggttacggcggctggcagcacatcattttgcctgcggtttccattgcctttatgagcctggcgattaacgcgcgtttactgcgcgccagtatgctggacgtcgccggtcagcgtcacgtcacctgggcgcgtctgcgcggcctgaacgacaaacagaccgaacgtcgccacatcctgcgcaatgccagcctgccgatgatcaccgccgtggggatgcatatcggcgaactgattggcgggacgatgattatcgaaaacatctttgcctggccgggcgtcgggcgctatgcggtgagcgcgatttttaaccgtgactatccggtgatccagtgctttacgctgatgatggtggtggtttttgtggtctgtaatttgattgtcgatttgctcaacgccgcgctggacccgcgcattcgtcgtcatgaaggagcgcacgcgtgaactttttcctctcttcccgctggagcgtacgcctggcgctgatcattatcgccctgctggcgctgattgcgctcaccagccagtggtggctgccgtatgacccacaggcgattgatttgccgagccgcctgcttagcccggatgcgcagcactggctgggcaccgatcacttaggtcgcgatattttcagccggctgatggcagcgacccgcgtgagcctcggtagcgtaatggcctgcctgctgctggtgctgacattagggctggttattggcggcagcgccgggttgattggcgggcgcgttgatcaggccaccatgcgcgtcgccgatatgtttatgaccttcccgaccagcattctgagcttctttatggttggcgtgctcggcaccgggctgaccaacgtaattatcgccatcgccctgagccactgggcgtggtatgcacgcatggtgcgcagcctggtgattagtctacgccaacgcgagtttgtgctggcgagtcggctttccggtgcgggccatgtgcgggtgtttgtcgatcatctggcaggcgcggtgatccctagcctgctggtgctggcaacgctggatatcggccatatgatgctgcacgtcgcggggatgtctttccttggcctcggtgtgaccgcgccgaccgccgaatggggcgtgatgattaacgacgcgcgccagtatatctggacccagccgctgcaaatgttctggccggggctggcgctgtttatcagcgtgatggcctttaacctggtgggtgacgcactgcgcgatcatctggaccctcatctggtgacggagcacgcacactaatgccgcaacagattgaactacgtaatatcgcgctacaggccgcgcagccgctggtacacggtgtaagcttaaccctgcaacgcgggcgcgtgctggcgttagtcggcggtagcggcagcgggaaaagtttaacctgcgccgcaacgctgggcattttgcccgctggcgttcgccagacggcgggggaaattttagccgatggcaaaccggttagcccttgcgccctgcgcggcatcaaaattgccaccatcatgcagaacccgcgcagcgcctttaatccactgcacaccatgcacacccacgcgcgggaaacctgcctggcgttagggaaacccgccgatgacgctacgcttaccgctgccatagaagcggtggggctggaaaacgccgcgcgcgtgctgaagctgtacccgttcgagatgagcggcggcatgttgcagcgcatgatgattgcgatggcggtgctgtgtgaaagtccgtttatcatcgccgatgaaccgaccaccgaccttgacgtggtagcacaggcgcgcatcctcgatctgctggaaagcattatgcaaaaacaagcgccgggaatgctgctggtgacccatgatatgggcgttgtggcgcgtctggcggatgacgtggcggtgatgtctgacggtaagattgtcgaacagggcgatgtagaaacgctgtttaacgcccccaaacatacagtgacgcgcagcctggtttccgctcatctcgccctctacggtatggagctggcaagttgacctaatacggtatggagctggcatcatgactttacttaacatctccggcctttcccatcactatgcgcacggtggatttaacggaaaacatcaacatcaggcggtgctgaataacgtttccctgaccctgaaaagcggcgaaaccgtcgccctgctggggcgcagcggctgcgggaaaagtaccctcgcgcggttgctggtgggtttagaaagccccgcgcaggggaatattagctggcgtggcgaaccgctggcgaaactcaatcgcgcccagcgtaaagcgttccgccgcgatattcagatggtatttcaggactccatcagcgccgtgaatccgcgcaaaaccgtgcgcgagatcctgcgtgaaccgatgcgccacctgctaagtctgaaaaaatccgaacaactggcgcgcgccagcgaaatgctgaaggcggtcgatctcgatgacagcgttctcgacaaacgcccaccgcagttaagcggcggccagctccagcgcgtctgcctggctcgcgcgctggcggtcgaaccgaaactactgattctggatgaagccgtttctaaccttgatctcgtgttacaggcgggtgtcattcgcctgctgaaaaagctacaacaacagtttggcaccgcctgcctgttcatcacccacgacttacgcctggtagaacgcttttgccagcgggtaatggttatggacaacggacaaatcgtcgaaacccaggtggtgggagagaaattaaccttttcctctgacgccggacgtgtgctacaaaacgcggtattacccgcattccccgtgcgccgtcgcaccacagaaaaggtttaacgcaaatgcaacgagtcaccatcacgcttgatgacgatttactggagacgctggacagcctgagccagcgtcgtggttataacaaccgttccgaagctatccgcgacattctgcgtagcgccctggcgcaagaggccacccagcagcacggcacgcaaggtttcgcggtgctgagctatgtgtatgaacacgaaaaacgcgacttagccagccgcattgtctccacccagcatcatcaccacgacctctccgtcgccacgctgcatgtgcacatcaaccacgacgactgtctggaaatcgccgtgttgaaaggtgacatgggtgacgtgcagcattttgccgatgacgttatcgcccagcgcggcgtgcggcacgggcatttgcagtgcttgccgaaggaagattgagttacgccattgtcccaatcgtcttcctgaatcgcagcagcgcaatggtgaaaaatgcgccgccaattgccatcagcgtcagaaactgcggccagacgatttcgaatccggcaccccggtagaggatggcctgcgcgaggctaacaaagtgtgtcgtcggcatggtcagcataatgtcctgcaccatctgcggcatactttcgcgcggcgtggaaccaccggaaagcatttgcagcggcagcagcaccagaatcaccagcagccccagttgcggcatactacgcgctatcgtccccataaaaatgccgatactcgtggtggcaaacagactgagcgccacgcccagcataaacagcgggatgctgccttcaatcggtacgcccagtacacctttcaccatcagcaccaggcttaatccgcttaccaccagcaccaccagccccatgctccagatcttcgccatcatgatctcaaacggcgttatcggcatcaccagtaagtgttccaccgtgccgtgttcacgctcgcggatcagcgcgcttccggtcaatacaatcgccagcatggtaatgttgttgatgatcgccatcaccccgccaaaccacgcgggatcgaggttcgggttaaagcgcatccgggtttccaggcttaccaacggttcgctgttatcacggtagcgcgcgacaaagctgttcacttcaccgttgataatattctggatatacccattgccggtaaatgcctggctcatgcgcgtggcatcgacgttcacctgaatatccggctggcgtccggcgaggacatcacgctgaaaattaggcggaatatttatcgcgaaggtatagcgtccggcgtccagtccggcatccatctcatcggcggtgatcatctccggtggcaaaaaccacggacgatagaagctgttaacgatccggttgcttaactggctttgatccatatcggcaatggcgatcggcgcgaggttcaagcttcctggcgtaacggtcgcactgctatacacgctcaccgtaaagctgaagacaatcagcgtcagcatcgctttatcaccgagcagactgcgcaactctttgatacccagattaaaaatattgcgtaaatggcgcatcatccctcctgttttttcagcagcaggatacttaagcccatcaccagcgggatggctatcagtaacgggataaaaagttgccacaaatcagtcagatccagcgctttgctgaacgtcccgcgggcgatagtcagaaaatgactggtcgggtaaacctcgccgatccaacgtccaggcccttccaggctagctaccggatcgatcatcccggaaaactgtgtcgccgggatcaacgtgataatcgccgttccgaaaatggcggcaatctggcttttcataaaggtggagatcagcagccccattccggtggcaatgatgatatacagcagcgccgccagggtgagcgtcaggaaactgcctttatgcggtacgccaaacacaaacacgctcaggccgcagagcaggaaaaagttcagcatccccagcgcgatgtatggcaactgtttaccaagcaaaaattcactacgcgtggtgggggtcacgtaaaggttgataatgctcccaagctctttttcccgcaccacgctaagggcgcttagcatactcgggatcatcatcagcagaagcgggatcaccgccggaacaatcgctggcaggctttttacgtccgggttatagcgatagcgcgtctcaatattcatcagcccgctttggctggcgggtgtgctttgtcggctcgccacatcctgtaaccagctctggtgcatggcctgcacgtaaccttttaccgtttcagcacggctcggcatcgctccgtcgatccagacgccgagttccacaggcgtaccacgcgcgatatcgcgcccgaaattgggcgggatctcaatcgccaccgtgatatcgcccgcacgcatccgacgatcaagctcgtcataactggtgagcggcggctgttcgataaagtaacgggaaccggagaggttgagtgtccacgcctggctactgacggtctggtcgcggtcgagcaccgcaaagcgcaggttttccacatccatactgatgccgtaacccattatcagcatcaggatcaccgttcccatcagcgccagcgtgctacgtactggatcgcgtcgcagttccagcgcttcgcggcggctgtagctaaacagacggcgcaggctaaatccctgacgcggcgcgtgggtggtgtcgtgtaccacgggcggcgcttcggcttcgttgctctgccctgccgcttcctgcaaataggcgataaatgcctcttccagactggcggctccgcgtttctcaaccagttcctgcggtgtaccgctggcaagcacttttccggcgtgcatcagactgatgcggtcgcaacgttccgcttcgttcataaagtgggtggagatgaagatagtcactttgtcctggcggctgagatcgaccatcaactgccagaacatatccctcgccaccggatcgacaccagaagtaggctcatcgaggattaacatctccgggcgatgaatcaccgccaccgccaggctaagccgctggcgaatgccgagcggcaaactctccggcagaatatcttcaacgtcgttgagcttaaaacgctcgctcatttcagccactcttgcgggaatttccgcttccgggatgtgaaacaaacgggcatgtaactcaaggttttgccgcacggtgagttcgttatagaggctaaacgcctggctcatatagcccacccgacggcgggtatcgatatcttttggatcaaccggttgcccgaacagccacgcctcaccttcgctggcgggcagcagtccggtgagcattttcatggtggtggatttaccgcagccgttgctaccaagaaaaccaaaaatctccccgcgtggaatgcggaaattaacgtgatcaacggcaacgaaggaaccaaaacgcatggtcagatcgcgcgcttcgatggcaatctctgcgttttcaggttgatacggtgggatcactaccgcctgatgcgcctggcgttgcgcttgcggtaacagatttataaatgcttcttccagcgtagcgctttgcgtttgctgccgtagctcttcggcgctgccagttgccagcacttctccggcattcatcgctaccagccagtcgaagcgttcggcctcttccatataggcggtggcgaccagcacgctcatattgctctgccgctggcgaatactgtcgatcagatcccagaactgggagcgggagagcgggtcaacccccgttgttggctcatcaaggatcaacagttccgggtcgtggattaacgcgcagcacagcccaagtttttgcttcatcccgccggagagtttccctgccggacgatcgcgaaacggtgctaacccggtgctggtcagcagctcattgattcgcacttcccgctccgctttgtcgtgaccgaacaggcgagcgaaaaaatcgacgttttcatacacgctcaaggtgtggtagaggtttttgcccagcccctgcggcatccaggcgatgcgcgggcagacgtcgcggcgatgcttcgggtcgcgcatatcgccgcccagcaccatcacattgccctgttcaatgacgcgggcaccggaaatcaagctcaacaagctgctcttcccgacgccgtccgggccaatcagcccgaccatacagcgggccggaatatcgagagtgatattgttcagcgcaacggtttttccataatgctggctcacgcccgccagttgcgcgacaggcgggacgggaaccagttccagatgcgtcattgcggcaacctcaccacgaggtcgtcaggccacggaagttcttcattcacccgcacccacgctacgcccggcaaaccggttttgacatattccagatgctgctggagtaattccggtgggatacgcgctttgacgcggaacatcagtttcagccgttcatcgctggtttcgacggtttttggcgtgaactgggcgacactggcgacaaaactgatggttgcaggaatacgcagatctggcgcggcatcgaggatcagccgggcttcaccgcccagtttcagcgtgcccgcctgttcggttggcaggaagaaagtcatatagacgtcgctgagatcgaccatattcagcacccgaccgcctgccgccagcacttcgcctggctcggcaacccgatactgcacgcgtccgtcacgcggggctttcagttcgctgtcatcgatatctgcggcaatgcgccgttcagtggcttgtgccgcttcgacgcgggtttgcgcctgaatgatattggtgcgtgccgcttctatagccgctttagaagcgcttacctgagctttcgcgctttccagcgcagctcgggcgctctcagcggcggcgcgatcgtcatccagctgttgcgcagaaatagcccctcgttgggccagactacgggaacgcgtatgacgttttgctacggagtccagttctgcctggcgttgattaaccaggctctgtgcggcacgagtttcgctttgtcgttgctccagcaaagcctgcgcggcagcaacggcgctttgtgcctctttgatttgcgcgatggcttccagtcgctgttcctgcaacacgcgagtatccatcttcgccagcacttcaccttcgcgaacaaacttgccttctttcaccagaatggtgtcgatacgcccggcaattttgctggcaatatccacttccgtcgcttcaatgcgcccattactgacagcaaagccttccggcacacctgccgggcgcaacagccaccacgccacgatagccgccaccgccagtaacccgacaacccaccacgccagatggcgcttactcttatccataatcgacccgccataatccctgtaagcaaacgacgcgtgttacaactgccgccgaacgacgttcagcggattcttccatccgggataagaaggaaacggcaaatacgaccagcgcgcagagcattgagcgccaacggggaaggcttagtgaaaacgggtagtaatgttgtcatcatcagcattcctggccgtaaatgaaacacgcatactcataagtgtgatctataaaactggctgacaaaacggtatccatcctgttggatagcgtttcacgcctgttcagttgcaggaacagagcattcctttttacgttttatcaacagtctcaaccagatagtaacattaatattcatgttgtctatggttcagagctgtaacattgtgcgccttctaatcaaaggcataagtccatttctgtttttttcatgctggtaagacttccagggagtggttatctcaggccctgcaccagggttaatttggcaattatgcatgctgaacattcttccagcatgtttactgtcacgggcgttaagacctaaaactgtccccgtttcgcctatgcgttctcttccaccatttccgttatgtgcaacaacttgatttatacctaacatttgactacatgctaatagtgcttcaagtttaggtctgtaatctgtgctaacagaaaaataacgattaaaggatcgacaagagatagcccggctagttttaaactttttgccattaattatagcatgatgctttttattgataattgccgctaattcgaccggatcgagagcattggtcatttcatcaatagagactgttatcggtcctataatgtaacgttttcgctgatcatcaaaagttatcccatgatgatttgccattattttgtatttggggtcatagaaacatacaggataatcttttatcccagagtaggtatcctcatcgagtggtttcatacgcgtgaagttctgcatatagttaccattgcaattcgtttcatgatttccagctaatacatgaacattttcattgatactcattatgcgttttaacaaatcgatgataaattgatcaccacagatattgctaaatcgatcgccggtttggtcgcccagaaacgtacatggcgtcacagcgtctttattaataactaaataaggctgaagactttctaaaataatgtctcttctgttcaggatactgattattgtattaacattagtgttaagttgctcattaaagttctcccttagcaatacgttgagaacttcatcttctatattaagcaactggctaaggaaattttctccttcagccatgattcccaaatgtcccgttgcgaaaagcgcgaacaaaactgcaccgacactgccatcggtatcaccaaaataggttggtctggtacttgtgggatcaacgggtaaacaattggagaaatagattctgtcagcgaactggggttttatcattgtttcgaatttaatatcagatacattatattggcttattttccagttccagatgggtttgtagctctcagtaactgcaacatcattagcattatcatttactgtcatattattaagtaaataaacaatactgcaccaattaatatcggtattatcaagagagcaaccgtaatttttgctattaattgtcacaataaactgataattattattcctacgtagaatatgagcacgcatgccgcttagcatactatatttttcactatgatccgtttgtatggtaaaactaattttgtcatcttgaatagattgttggaaccgttctatttgccaatcatctattttttccacaacctcaccgagcattgtcctggcaatactacttatatcatcacctataccatttgcaatatacccaaacagttctttagtgaagttggtaacatgctcttgcaccatatcatttgttgcgattgtcgttgtactgtcgttagtgcctgccacagttccaattttcatattttacctcatattatttaccgcgaggaatacatagttaacattttatcttatgacatacacctcatgttcgatgggaaaataattatattttgcacaaatcattcagcctcaaagcataatatgaaatttcttatctcatagcagagaaagtccctaaagattgtagaggcgtcatcagaacatgcctctacaatcgattaagaaaacctatgaaatactggcaggattaaaaagacataccaccgtattcatggagttttaatgtagttgaaaacaactaagcccactggaataaattattttattatttttatcacgtgcttccttcagggaatttagccccataataccattatcaaattgttgattatgatctaccccgggcccatgatgcccatatttttgtctaatgtatttgctggggtcttcacctttgagtgtctccccacatatgaagatacgttcacgtgctggtctgaaatcagtagtgttatcaaaataattagcatatacaggtgtgggtttcaaagtattgcttcggattagatggaatagaggatcatccatgtgttctttatgttttttattaaaaatattggctaattcctcaggatcagtaggatttttcatctgattaaatggaacctgcaaagcacgctgacaataacatttttttcttcatctcttattattccgtgatgactggttaaaacttgcctttcactgtcataattacaaacatcgagcgttttaattaagttatacgtatcaccggcagagagtttatgatttgctagtcgtgcagtatagttaccattaaaattgatttcatgatttccagccagaacgacgacatttttattaatacggctatctttattaccctccatatttcgcatagaatttagcaaagtaaggatatatttatcaccaaaaatagtactaaatctatcgcctgtatgatccccaaggaagatacaaggggttatcgcatcgtcctttaaaaaaacatgttgatgcaactcattcaagatcatgtctctcgtatttaataaatcgtagagcactttattatttttatgtttgtatgcagaactagccatctcttcgtgttttaataattcacataataaactccaacccttttccctgatgcctatatgcccactaacgagcaatgcataaagtacagcgcctactcttccatctgtatcgccaaaataagccgtgttggcattttgtgggttaatcacaccacactgtttatagaagtctattttactaaacacagatttaacatagctatcaaacttttccttagtaaacgtctctttagagacatcccaacgccagtcaggtttgaaattaccactaagaagagtaaagaaatttctcgctatgatagaaagcccatcaactttataaattatatcacttttatctccagaggaattaataaaataataaccgcccttacactcaacagtaacggtaatgggagagcttaattttaacacatggttattgtctggtataattgtaaagataaacgtatcagtagtattgtcggcgaatctattatattcttgaatatctatagaaggttcactattataaaaccatactttctccatctggtgactacgatcatttaccttccagtgaccatgttgcaggaaatagatgatatgcaggccaaaatcgttatctatttggctatcattatccagtttatcaaattcaactatctttgcacgatgtgttttatcaaccttgccatggtgttgatgactgttaactttatcactatgcttatcttgatggctactagagatgtttctaatctgattgtcaattgctttcataaataacctgtgatatttttgaattgtttgtaacaaaataaatgatacttgtctgaaaaacagatttacgacgatataaaataataatacttatatgttcgctgattttaagcaccgagactatccggtcttttaccaaataatgaagaataatccctccctggaagataattgtaaaaaacaacagcataagaattaatcttaggataaatttttatttatcatggccttttgaacgctgaaaagtagcgctctgcaaagtaaaccccgctatagttatgctatgcatttgtctttaatgatatctcgtcattatattaacaggatgaaattatcattaatgcatatttcaatattagcagggatacctgaggagtttaaagtgaacatatatatcgggtggcttttcaaattaatccctttgattatgggcttaatttgtatcgcgttaggtggctttgtgctggaaagtagtgggcaaagcgagtatttcgtcgcgggtcatgtgctgatttctctggcggccatatgcctggcattattcactaccgcatttattatcattagccagctcacgcgcggcgttaatacgttttacaatacattgttccccattattggctatgcggggagtattatcaccatgatatggggttgggcactgttagcaggcaatgatgtgatggcagacgagtttgtcgccggccatgttattttcggcgttggtatgattgccgcctgtgtaagcacggtggcagcgagttccggtcactttctgctcattcccaaaaatgcagcggggagcaagagcgacggaacaccggtacaggcttattctagtttaatcggtaactgcctcattgccgttcccgttttactcaccctgctcggtttcatttggtctattacgctgttacgtagtgctgacataactccgcattatgtcgcgggtcacgtattgcttgggttaaccgcaatctgtgcctgtctaattggccttgttgccacaattgtccatcaaacacgtaatacgtttagtactaaagaacactggctgtggtgttattgggttatttttctcggcagtatcacggtactgcaggggatatacgtcttagtcagttccgatgcaagcgcccgactggctcccggcattattcttatttgcctcggaatgatctgttacagcatattcagtaaagtctggctactggcactggtatggagacgtacctgtagcttagccaacagaataccgatgattcccgtcttcacctgcctgttttgccttttcctggcaagctttcttgcggaaatggcgcagaccgacatgggatattttattcctagccgagttctggtcggtttgggagcggtatgctttacgttgttcagtatcgttagtatattagaagcgggttctgctaaaaaataattgcaacgtaccggataaaaccagcgttgaccatttgcgtaacgctggtttttcttaggcatcatgaaataacgcagcattaatgcatagtggttaagtataaaaaacagcaaagttactgtttttttcaacctgttcatatttcataaagatctggccactgagtgagttttcaatcacctttccatccaccttatattaagcatggagggtttcagttcacgggctcattagaaaataatcacaagataaccactatcaaaattagctcatttttaatgcgactctaataattttcatctttaggaaataggtcaggagctctttgctgcaatcaaatcctgcgcacaagcccacgcactgctccacgcccactggaagttatagccccccagccagccggtgacgtccatcacttcgccgatgaagtacagcccaggcactttgcgcgcttccatcgtccgactagagagttcgttggtgtccacgccgccgagcgtcacttcggcagtgcgatagccttcagtgccgttgggttgtacgcgccagtcggtcaatgtgctaatcagtgcctgttggtcacgcacgttgagctgttttaggctaacatccgggatttgcccgagttgctgtaagcgttcaaccaaccgcttcggtagatgaaccgccagtgtgtttttcaggctttgattcggatgtgcgttacgctgctcattcaggaaggtttcgaggtccacatccggtagcagattgatgctgacaaattcccccggttgccagtagctactaatctgcaacaccgccggtccagacaagccgcggtgggtgaagagtaagttctcacggaaaacggtgccgttttcagcggtaatcacggaaggcaccgccacgcccgccagcacctgtaactcttcgagcaacggtttatgcagagtgaatggcaccagacccgcgcgggtcggcagcacgttgaggccaaattgttcggcaatcttataaccaaacgggctcgcgcccagccccggcatactcagcccaccagtcgcgatgaccagcttttcgcaaccgacagtcatgccgttcagatcaagcgtgaagcctgtttcatccttcgccacactcagcacttcgctacgcaatctgaaggtcacattgcccttctcgcactcatccaccagcatgtcgacaatctgctgcgcggagtcatcgcagaagagttgccctaacgttttctcgtgccaggcgatgccgtgtttattgaccagatcaatgaaatcccactgggtaaaacgtgcgagtgcagacttacaaaaatgcggattctggctcagataagcgcctggttcgacataaaggttggtaaagttgcagcgcccaccgccagacataaggattttgcgccctggttttttaccattatcgatcagcagaacccggcgtcctgcctgacctgccagcgcagaacagaacatacccgccgcaccagcgcctataataatggcatcaaacctttccacgttgcgctcctcttagaaaaaacgggcgtgaattgtaaagattcctcagtggtcgcaccagcatcaatattactaaaaggaagtatttgcctgaattatataagataattattttttgagtgaaatccatacagggggcaaatcaaaaaaagtctatatttcactttgcccgcgccgcgaaagtcactgataatgcgccgcgttcatgtcctcaaaatggcgtaacgtcctatgctacatttgtttgctggcctggatttgcataccgggctgttattattgcttgcactggcttttgtgctgttctacgaagccatcaatggtttccatgacacagccaacgccgtggcaaccgttatctatacccgcgcgatgcgttctcagctcgccgtggttatggcggcggtattcaactttttgggtgttttgctgggtggtctgagtgttgcctatgccattgtgcatatgctgccgacggatctgctgcttaatatgggaagctctcatggccttgccatggtgttctctatgttgctggcggcgattatctggaacctgggtacctggtactttggtttacctgcatccagctctcatacgctgattggcgcgatcatcgggattggtttaaccaatgcgttgatgaccgggacgagtgtggtggatgcactcaatatcccgaaagtattaagtattttcggttctctgatcgtttcccctattgtcggcctggtgtttgctggcggtctgattttcttgctgcgtcgctactggagcggcaccaagaaacgcgcccgtatccacctgaccccagcggagcgtgaaaagaaagacggcaagaaaaagccgccgttctggacgcgtattgcgctgatcctttccgctatcggcgtggcgtttagccacggcgcgaacgatggtcagaaaggcattggtctggttatgttggtattgattggcgtcgcgccagcaggcttcgtggtgaacatgaatgccactggctacgaaatcacccgtacccgtgatgccatcaacaacgtcgaagcttactttgagcagcatcctgcgctgctcaaacaggctaccggtgctgatcagttagtaccggctccggaagctggcgcaacgcaacctgcggagttccactgccatccgagcaataccattaacgcgctcaaccgcctgaaaggtatgttgaccaccgatgtggaaagctacgacaagctgagccttgatcaacgtagccagatgcgccgcattatgctgtgcgtttctgacactatcgacaaagtggtgaagatgcctggcgtgagtgctgacgatcagcgcctgttgaagaaactgaagtccgacatgcttagcaccatcgagtatgcaccggtgtggatcatcatggcggtcgcgctggcgttaggtatcggtacgatgattggctggcgccgtgtggcaacgactatcggtgagaaaatcggtaagaaaggcatgacctacgctcaggggatgtctgcccagatgacggcggcagtgtctatcggcctggcgagttataccgggatgccggtttccactactcacgtactctcctcttctgtcgcggggacgatggtggtagatggtggcggcttacagcgtaaaaccgtgaccagcattctgatggcctgggtgtttacccttccggctgcggtactgctttccggcgggctgtactggctctccttgcagttcctgtaatcgtacgcaccaaaacgagcgggtcagctggcccgcttcagattgtgacatagtgcgctttgttcatgccggatgcggcgtgaacgccttatccggcctacaaaaacatgcaaattcaatagattgcagagattatgtaggcctgataagcgtagcgcatcaggcaattttgcgtttgtaatcagtctcgagcgggtcagtttactggcccgctttttttatgcgttattattgctgaagtgcttaatgccaaatcatcaatgcaatcaggctgaccaccaccagaccacacaatgcgctggtcagaataaactgccgacgcacccgctcacagcggcgaataaattcatcatcgtgatgatcgcgataacgttgggcatagatataccaaacgagacgcacctgtttgttgggttggccatgactggtaaaaaagccccctccatcaacatattgatagagcaatggatcgcagttacgcagtaccactaacaacgcgcgtagactactgaaatagcgcgccatgttaacaatgcaaacgacacataaagcccaaaataatgcgacggtgcttatcatacctcctccccggcgacctgcccgcggagttccaccccggggctaccgctcccgatacgctgccaatcagttaacaccaggtcctggagaaaccgcttttgtggtgaccaacatacgagcggctctatagatagtgtaggagatcaggttgttttttttccagaaggttaaccactatcaatatattcatgtcgaaaatttgtttatctaacgagtaagcaaggcggattgacggatcatccgggtcgctataaggtaaggatggtcttaacactgaatctttacggctgggttagccccgcgcacgtagttcgcaggacgcgggtgacgtaacggcacaagaaacgctagctggccagtcatcgacaactttatggaaggagtaacactatggcttataaacacattctcatcgcggtcgacctctccccggaaagcaaagttctggtagagaaagcagtctctatggctcgcccctacaatgcgaaagtttctctgatccacgtagatgtaaactactctgacctatacaccgggcttattgatgtgaatctgggtgatatgcagaaacgcatctctgaagagacacatcatgcactgaccgagctttccactaatgcaggctacccaatcactgaaaccctgagcggcagcggcgacctgggccaggttctggtcgatgcaatcaagaaatacgatatggatttggtggtttgtggtcaccaccaggacttctggagcaaactgatgtcttccgcacgtcagctgatcaacaccgttcacgttgatatgctgattgttccgctgcgcgacgaagaagaataatcttccctctacgacgtgttcctgaacgcccgcatatgcgggcgttttgctttttggcgcgccttgttacctgatcagcgtaaacaccttatctggcctacggtctgcgtacgcaatcaaaatccccagccaatacaacatttaacaccatcatattttccatcattagtgtgatcatctggttattttctgttgtaatagtgtattaatctattcaccgcatcaatattaagaatctctgacagatgtaaactttttcgcgcgttatcccttacgcgttcatacttttcaggatggtattggaaggttaataaatatgaatacaacaacacccatggggatgctgcagcaacctcgcccatttttcatgatcttttttgtcgagttatgggagcgattcggctactacggcgtgcagggcgtactggcggttttcttcgttaaacagcttggattcagccaagagcaggcttttgtcacttttggtgcttttgctgcgctggtctatggcctcatttccattggcggctatgtcggcgaccacctgctggggaccaaacgcaccattgttcttggagcacttgtgctggcgattggctacttcatgaccggcatgagcctacttaagcctgacctgattttcatcgccctggggactatcgctgtcggtaacggcctgtttaaagctaacccagccagcttgcttagcaagtgctatccgccgaaagatccgcggcttgatggcgcattcaccctgttctatatgagcatcaacatcggcagcttgatagcgttaagcctggcccctgtgatcgctgatagattcggttatagtgtcacctacaacctgtgcggggcggggttaattatcgcattactggtttacatcgcctgtcgtggaatggtgaaagacattggttctgaacccgacttccggccaatgagcttcagcaaactgttgtacgtgttacttggcagcgtggtgatgatcttcgtatgcgcatggctgatgcacaacgtagaagtcgccaatctggtgctgattgttctctccatcgtcgtcaccatcatcttctttcgtcaggcattcaagctggataaaaccgggcgcaataaaatgtttgtcgcctttgtcctgatgctcgaagcggtggtgttttacattctctacgcccagatgccaacaagcctgaacttctttgccatcaacaacgtgcatcatgaaattctcggtttttccatcaacccggtcagcttccaggcgcttaacccgttctgggtggtactcgccagcccaatactggcaggcatttacacgcatctgggtaacaaaggcaaagacctcagcatgccgatgaaatttactctcggcatgtttatgtgcagtctgggctttttgacggcggcagctgcgggaatgtggtttgcggatgcacaagggctgacaagcccatggtttatcgtgctggtgtacttattccagagcttaggtgaactgtttattagcgcccttggcctggcgatgattgctgccctggtgccgcagcatttgatgggctttattctcgggatgtggttcctgacgcaggctgccgcgttcttgctgggcggctatgtggcaacatttaccgcggtgccggacaacattaccgatccgcttgagacgttgcccgtctataccaacgtgtttggtaagattggtctggtcacgctgggcgttgcagtagtgatgctgttgatggtgccgtggctgaaacgcatgattgcgacgccggaaagccattaattattcttgcagaaagcagggtagcgttatcgctaccctgttttagttttacactggcgtacctgcatagatatcaaagcgatgccctttagtgactaccgcgtttggcgtggcgacattcgccagcggtggcgcgtagtccgggcgctttaccaccacgcgtttggtcgccagcaagcgtgcaggctccagtaatccatcggcatcaagatccggtcccaccaggctctgaaagacacgcatctcttttttcactagcgcgcttttctgcttatgcgggaacatcgggtcgagataaaccacctgcgggcgcggggtaatatcagtcagcgccgtcaggctggaggcgtgaattaactgcaaccgctcctgcaaccagccgccgatttccgcatccgcataaccacgcgccaggccgtcgtcgagtagcgcggcaaccactggattacgctccagcatccgcacgcggcagccgacactagccagtacaaaggcatcgcgcccaagtcctgcagtggcatccaccacatccggcaaataatcgcctttaatgcccaccgctttcgccaccgcctcaccgcgaccaccgccgaatttgcgtcggtgcgccatcgctccgccaacaaaatcaacaaagatgccgccaagttttggctcatcacgcttgcgcaattccagatgttccggcgttaacaccagcgccatcaggttgtcttcatcgtgctccagcccccagcgggccgccagaacagataaggcaccgtctccggtgcctgtttcatcaattaagcagattttcactgaatgatcagcccttaatgccgtaatgctccagcatcgcatccagctgcggttcacgaccacggaagcgtttgaacagatccatcggctcttcactaccgccacggctcagaatgttgtcgaggaagctctgcccggtttcacggttgaaaatgccctcttcctcaaagcggctgaaagcatctgccgccagtacgtcagcccacaggtagctgtagtaacctgcggcataaccaccggcgaaaatatggctgaaagcgtgcgggaaacggccccaggacggagatggcaccacggcaaccagtttcttgatttctgccagagtttcgaggatttttgccccctgatccgggcggaactcggcatgaaggcggaaatcaaacaggccgaactccagctgacgcagaataaacagcgccgcctggtagttcttcgccgccagcattttatccagcaactctttcggcagcggttcgccggtttcatagtgaccagagataaacgccagcgcctccggctcccagcaccagttttccataaactgactcggcagttcgaccgcatcccacggcacaccgctgataccggaaacaccagcggtttcgatgcgggtcagcatatggtgcaggccgtgaccgaactcgtggaagagggtgatcacttcgtcgtgagtgaacagcgccggtttaccatttaccgggcggttgaagttacaagtcaaatacgcgaccggtttttgcaaagaaccatcagctttacgcatctggcctacgcagtcatccatccacgccccgccgcgcttgttttcacgggcatacagatcgaggtagaagctaccgcgcagttcgttattttcgtcatacagttcgaagaaacgtacatccggatgccagacatcaacatctttacgctctttagcggtgatgccgtaaatacgcttaaccacttcaaacaggccgttaaccgctttgttttccgggaagtacggacgcagctgttcgtcactgatgctgtagaggtgctgtttttgtttttcgctgtagtaagcgatatcccacggctgcaactcatcgacgccaaattcggctttggcaaaggcacgcaattgcgccagctctttttcgccttgtggacgcgcgcgttttgccagatcggttaagaaatccagcacctgctgcgggttttctgccattttagtggcaagggatttaaaggcgtagttttcaaagcccagcagttgcgccagttcgtgacgcagcgcgaggatctcttccatcaccttgctgttatcccatttaccggcgtttgggccttgatcggaggcgcgggtgctgtaagcgcgatacatctcttcacgcagagcctggttgtcgcagtaggtcattaccggcaagtagcttgggatatccagcgtcagcaaataaccttccagctctttcgcttcggcctgggcttttgccgcagccagcgcgctttctggcatccccgccagctccgcttcgtcggtaacgagtttggtccagcccattgtcgcatcgaggacgttgttgctgtactggttgcccagttcagaaagacgggtcgcaatttcgccgtaacgctgctgtttctctttcggcagacctatgccagagagttcaaagtcgcgcagtgcgttatcaaccgctttcttctgcgccgtgttcagcgtggcgtaatgatcgccatcgcgcaggtcgcgatacgctttatacagcccttcatgttgccctacccaggtgctgtattcgctcagcagcggcagggtttgttcgtaggcttcacgcagttccgggctatttttcacgctgttcaggtggctgaccggggagaagatacgccccaacacatcgtccacttccgccagcggctggcagagattttcccaggtgtacggtgccccttgcgctactacgcgctccacgttttcgcggcagtcgttcaatgccttagtcacggctggaacgacatgttccgggagaattttagaaaacggaggcaattcaaagggagtcagtaacggattcgtcattcgcgcagtcctggttaaagaggttaaggaagcgctcaacaggcgctttacataatgtgtgtagcatggggttaagtgtagtgaatttcaatgagaaacgttacgctttcgcggcggcggcctcttttcggtatactgtcctgatacgcttttgtgcgccccgaatacgggccgatttttacttaccggaacacctttacccatgctcagttatcgccacagctttcacgctggcaaccacgccgacgtccttaaacataccgttcagagcctgatcatcgagagcctgaaagagaaagataaaccgtttctctatctcgacacccacgcaggggccgggcgttatcagttaggcagcgaacatgccgagcgtaccggcgaatatctcgaaggcatcgcccgtatctggcagcaggacgatttgcccgcagaactggaggcgtacatcaatgtggtaaaacacttcaaccgtagcggtcagttgcgttactaccccggtagcccgttgattgctcgcctgctactgcgtgaacaggacagcctgcaactgaccgaactgcacccgagcgattacccgttgttgcgttctgaatttcagaaagatagccgtgcgcgtgtcgaaaaagccgacggtttccagcagcttaaggccaaactgccgccggtttcccgccgtggtttaatccttatcgacccgccgtatgaaatgaaaactgactatcaagcggtggtcagcgggatagcagaaggttacaaacgtttcgccactggtatttacgcactgtggtatccggtggtgctgcgtcagcaaattaagcgcatgatccacgatctggaagcgaccggtattcgcaaaattctgcaaattgaactggcggtactgccagacagcgatcgccgtggcatgaccgcttccggcatgattgtgattaacccgccgtggaaactggaacaacagatgaataacgtgctgccgtggctgcacagcaaactggttccggcaggcaccgggcacgccaccgtaagctggatcgtgccggagtaattgcagccattgctggcacctattacgtctcgcgctacaatcgcggtaatcaacgataaggacactttgtcatgactaaacactatgattacatcgccatcggcggcggcagcggcggtatcgcctccatcaaccgcgcggctatgtacggccagaaatgtgcgctgattgaagccaaagagctgggcggcacctgcgtaaatgttggctgtgtgccgaaaaaagtgatgtggcacgcggcgcaaatccgtgaagcgatccatatgtacggcccggattatggttttgataccactatcaataaattcaactgggaaacgttgatcgccagccgtaccgcctatatcgaccgtattcatacttcctatgaaaacgtgctcggtaaaaataacgttgatgtaatcaaaggctttgcccgcttcgttgatgccaaaacgctggaggtaaacggcgaaaccatcacggccgatcatattctgatcgccacaggcggtcgtccgagccacccggatattccgggcgtggaatacggtattgattctgatggcttcttcgcccttcctgctttgccagagcgcgtggcggttgttggcgcgggttacatcgccgttgagctggcgggcgtgattaacggcctcggcgcgaaaacgcatctgtttgtgcgtaaacatgcgccgctgcgcagcttcgacccgatgatttccgaaacgctggtcgaagtgatgaacgccgaaggcccgcagctgcacaccaacgccatcccgaaagcggtagtgaaaaataccgatggtagcctgacgctggagctggaagatggtcgcagtgaaacggtggattgcctgatttgggcgattggtcgcgagcctgccaatgacaacatcaacctggaagccgctggcgttaaaactaacgaaaaaggctatatcgtcgtcgataaatatcaaaacaccaatattgaaggtatttacgcggtgggcgataacacgggtgcagtggagctgacaccggtggcagttgcagcgggtcgccgtctctctgaacgcctgtttaataacaagccggatgagcatctggattacagcaacattccgaccgtggtcttcagccatccgccgattggtactgttggtttaacggaaccgcaggcgcgcgagcagtatggcgacgatcaggtgaaagtgtataaatcctctttcaccgcgatgtataccgccgtcaccactcaccgccagccgtgccgcatgaagctggtgtgcgttggaagcgaagagaagattgtcggtattcacggcattggctttggtatggacgaaatgttgcagggcttcgcggtggcgctgaagatgggggcaaccaaaaaagacttcgacaataccgtcgccattcacccaacggcggcagaagagttcgtgacaatgcgttaaatgttaaagggctaagagtagtgtgctcttagcccttaattacgtttccgctatcagttcagaagctgaagcagaaagcggatcagttccagcagcgcaattaacgcccctagaacgatgattgctttatcaatcacccgttttctccatgcgatggagtgagaatgcatccgcttactcatccactgcctgtcacggcgcatgtctcattgttagataagaactctctcactccggccagagcatcagttaacggcaccacccgtacttctgaccaggactttgaaagcgtttatgcgcattgccagagtgaaaatgcctcagagctaactggataatcatacagtacatgcaggttataaaaccagcacgtccttgcaatagtttcagtatggtattagcattgatgcgttagatgatggctatctcactccagtcagagccaccaactcagggctggaaagtaaaaaaccgacgcaaagtcggtttttttacatccggattcggacaaggcttaatatgacgatgacccagtgaaagtatataaatcgtcactgcgatatataccgaagtgctccctccgccagctgaagaaatcgctaattcttgcaatgttagccactggctaatagtattgagctgttagataagaactctctcactccagccagagccaccaactcagggctggaaagtaaaaaaccgacgcaaagtcggtttttttacgtcctgattcagacctcctttcaaatgaatagccaactcaaaattcacacctattaccttcctctgcacttacacattcgttaagtcatatatgtttttgacttatccgcttcgaagagagacactacctgcaacaatcaggagcgcaatatgagttttctgttacccatccaattgttcaaaattcttgctgatgaaacccgtctgggcatcgttttactgctcagcgaactgggagagttatgcgtctgcgatctctgcactgctctcgaccagagccagcccaagatctcccgccacctggcattgctgcgtgaaagcgggctattgctggaccgcaagcaaggtaagtgggttcattaccgcttaagtccgcatattccagcatgggcggcgaaaattattgatgaggcctggcgatgtgaacaggaaaaggttcaggcgattgtccgcaacctggctcgacaaaactgttccggggacagtaagaacatttgcagttaaaaatttagctaaacacatatgaattttcagatgtgttttatccgggaggcattatgttactggcaggcgctatctttgtcctgaccatcgtattggttatctggcagccgaaaggtttaggcatcggctggagtgcaacgctcggcgcagtactggcgttagttacgggcgtggtccatccgggtgatattccggtggtgtggaatatcgtctggaacgcgacggctgcgtttatcgccgtcattatcatcagcctgctgctggatgagtccggcttttttgaatgggcggcgctgcacgtcagtcgctggggtaatggtcgtggtcgcttgctgtttacctggattgtcctgctcggtgctgccgttgccgccctgtttgccaatgatggcgcggcgcttattttgacaccgattgtcatcgccatgctgctggctttagggttcagtaaaggcactacgctggcgttcgtgatggcggccggattcattgccgataccgccagcctgccgcttattgtctccaacctggtgaatatcgtttccgctgatttctttggcctcggctttcgcgaatacgccagcgtgatggtgccggtggatatcgccgcgattgttgccacgctggtgatgttacatctctattttcgcaaagatattccgcagaactacgatatggcgctgctgaaatctcccgcagaagcgatcaaagatcctgctacgttcaaaactggctgggttgttttactgcttctgctggtgggatttttcgtcctggaaccgctcggcattccggtgagcgccattgcagctgtgggcgcgctgatattatttgtcgtcgctaaacgcggtcatgcgattaatacgggtaaagtcctgcgcggtgccccctggcagattgtcatcttcagcctcggcatgtatctggtggtttatggcctgcgcaatgccggattaacggaatatctttctggcgtactcaacgtgctggcggataacggcctgtgggccgcgacgctcggcaccggattcctcaccgccttcctctcttctattatgaacaatatgccgacggtactggttggcgcgttgtccattgatggcagcacggcatctggcgttatcaaagaagcgatggtttatgccaatgtgattggctgcgatttgggaccgaaaattaccccaattggtagcctggctacgctactctggctgcacgtacttagccagaagaatatgactatcagctggggatattacttccgtacagggattatcatgaccctgcctgtgctgtttgtgacgctggctgcgctggcgctacgtctctctttcactttgtaatgagatactgatatgagcaacattaccatttatcacaacccggcctgcggcacgagccgtaatacgctggagatgatccgcaacagcggcacagaaccgactattatccattatctggaaactccgccaacgcgcgatgaactggtcaaactcattgccgatatggggatttccgtacgcgcgctgctgcgtaaaaacgtcgaaccgtatgaggagctgggccttgcggaagataaatttactgacgatcggttaatcgactttatgcttcagcacccgattctgattaatcgcccgattgtggtgacgccgctgggaactcgcctgtgccgccctagtgaagtggtgctggaaattctgccagatgcgcaaaaaggcgcattctccaaggaagatggcgagaaagtggttgatgaagcgggtaagcgcctgaaataaagcggcgatatcccccccacaggttgttagaaaagtgcgctttatttatgtcggatgcgacgctggcgcgtcttatccgacctacaaagttatgaaaattcgatgaatagtatgttatttgtaggcctgacaggcgtagcgcatcaggcgattttgctatttacacagtactccctgcgtgagattccaattatcgcgtccagcatggtgtatcagtgagctgcttagttatcagcgatacagcgcagtagtttaaagacgtactggattatgatttatcagtggtttacacaacaaattattaaataattataagataccttaacccattttattattacacatctaaaacatcacaaaaaaaatcacttcacacactatcagagaacataataactttttaaaatgagcgcattttgatagttgttaacgatttcctttacgatactatcactaccctttttttacacacaaatattaccgggtggagataaaagggaaatcaaaggtaattatatcaggaagatataacgcattacatttattgtgtgtagaagaaaatccattcctgttctaattatccaatttaaacatcttagcataaaacaaatgatgaataaggaattttatattgattattagcactttataatcattgaataaaaatagattttatgtacttttaaaacaatgcactatattatggggtgatggatattcatgtcacgccccaaaattaactgagttcacctaaacagaaaggatataaacatcagacaggtttacgttactatcaggcatatcacctcagaatcagatgaaaactataaagaaatatctattatggttttaatatttgttgataaggatagtaacatgaacatgacaaaaggtgcactcatcctcagccttagttttttgcttgccgcatgtagtagtattccgcaaaatatcaaaggcaataaccaacctgatattcaaaaaagttttgttgctgttcataaccagccggggttatatgttggtcaacaagcgcgctttggtgggaaggttatcaacgttatcaatggcaaaacggatacgttgttagaaatctctgtattaccgttggatagctatgcgaagcctgatattgaagccaactatcagggccgactgctcgccagacaaagcggcttccttgatccagtgaactatcgtaatcactttgttaccatcctcggcaccattcagggtgaacaacctggctttatcaataaagtcccgtataacttcctggaagtgaatatgcagggcatccaggtgtggcatttgagagaagtggttaataccacctataacctgtgggattacggctatggtgcattctggccggaaccgggctggggtgcgccttactacaccaatgcggtgagtcaggtaacacctgagctggtcaaataacaccaccgaaagatgcagatgctttctcagcatctgcatcatgcattacatcaaattaatacacagtaagctaactattattattataagccctgtcctgttaattacctttggcaaactgattataaagttaatgtccgcaccaggagtcggttatgtttcttataattaccagggatacgatgttcttcaccgcgatgaaaaacattctgagtaaaggtaatgtcgttcatatacagaacgaagaagagatcgacgtaatgttgcatcagaatgccttcgtcattattgatacattaatgaataatgtatttcattctaattttctcactcaaattgaacgattaaaacctgtccatgtcattattttctccccctttaatattaaacgctgcctggggaaagtgccggtgacctttgttccgcggactatcactatcattgattttgtcgcactcatcaatggcagttactgctctgtgcctgaagcggctgtgagtcttagccgcaagcaacatcaggttctgagctgcattgcgaatcaaatgacaacggaagatattctggagaaactgaaaataagcctaaaaacgttctactgccataaacacaatatcatgatgatcctcaatcttaagcggatcaatgagctggtacgccatcagcatattgattatctggtgtgaatttcaggcttacggtgagtctggctacgctgccacacagattagctaatactaacgcctttcacccctgccataccttttaataatcgcaacaggtcttctatgctcgttgtggcatgaagctggatatcaatggcgaccacttcatgatcttcattttcctgcaagctaactaaatcagtttttattttttgctgcttaaaccagtcgagcatacttaccgtattaccgttcactaatgtcagctgtaaatggtaatttttgttcatcaggcggaaggttaattgatggaagacttccagcaccaacaaggtcatcacactaccataaatacccagttcgtacataccgctgccaataaccatacctatggcggcggtcacccagatatccgctgccgtcgtcagacctacaatattttggttacgaacgagaatgttacctgcaccgataaacccgacgcccgtcaccacctgagcagcaatacggctggggtcgagtccgacgtgatctaaagacagcacgtcagcaaaaccatatttgctaacaatcataaacagggcgcttcccatgccaattaatacatgtgtgcgtaaccctgctcctttgccgcgcatttgcctttccatgccaatagcgccacaggcaattgccgcgagtataagacgtataataaattctgctgtcatataaaaatgcaaaaaggagcagcaagatggctcaacttgctactcctttttacttgcacctcattaattcggcaagtcattagatgcttgatttttgaaggtatacaaatttttctgcgggtttttcttacagtattcgatcactttaggaatttgagtgagatcggtttcatttaaagtaacggtatcgccacctttatatactgtttcttcatgcagcatccaccatgcaaccggggtcattgcttttggattcagatcaataaattcctggcaggtcatatctttagcggattcattggctgccaacgcagattgtgcgttcaccagactcaaagccgctacagcgcccataaaaataaacgctttacggagagaactaatattcattttgtaacccattcaatatagagattatatatgaacaggaggaatagctgcttttaaagaagatattccggcctgttcaatatgcaaggaagtacgatgtaacgcattcccggaattacatatctttcttaattttgtcccattcgcctttaactttatctttaaagttggcttgtttatcctgagtacaagcctgaacgatagctggggttacggttgcaataccctgaacatctaaaaccgcatcttctggtttatctttgttgttcagcgcttcagcaaaaccaactgcagttggctggaaggattcgtccacagccaggaaatcttcacaggtccaggagttgaccggttttttgttatcagctgctttttgcgcatccgctgcattgctcacaactggcagaagaagcagaccaccaagaataacgcctaatacttttttcatcgtaatatcctcaactataaagtgaaagagccgtcacgaatcaatttcgacactgaggttataacctggttttctgtatatgtcatgttgatggaaaatatcaaaatcagatatttttatttcaatacaatgagttacagatgcatcagatactgcaattaggaaatttttattaaatcgactgcattcttagacgcgtttttggcatagattgatagcaggggattttcttcttaattttatagggtggttctatgttatatatagataaggcaacaattttgaagtttgatctggagatgcttaaaaaacatcgcagagcaatccagtttattgccgtgctgctgtttatcgtcgggttgctgtgtatcagtttcccgttcgtctctggcgatattttaagcacagtagtgggtgcattattaatctgcagcggtattgcgcttattgtcgggttattcagcaaccgcagtcataatttctggccggtattatccggtttcctcgtcgcagtcgcctatttattgatcggctatttcttcatccgcgcaccggagctgggcatttttgccattgcggcatttattgccggtttgttctgtgttgcaggggttattcgcctgatgagttggtatcgtcagcgtagtatgaaaggcagctggctacagctcgttattggtgtgctggatatcgtcattgcctggatattccttggtgcaacgccgatggtgtctgtaacgctggtttccacactggtgggaattgaactgatatttagcgccgccagcctgttcagcttcgccagtttgttcgttaagcagcaataattaccccggttgtcacccggatcatagtcacttgatgtgactatgatccgattaatactctctccgctacgcagtgttgtagatcaattgcgcactatcattgaaataattacctgctagtgattatttcaacctactgaatttcatctaatttttttcactctatggcaaattagccatttcaaacattatcatggctgatattttccgtagtcaggtttaatgttttaaaagtgctgtgggaaagtgaacaaagagttccgtaagcgttgatgctatgggcggttaaataagtaatccgggttcatttttttgcaactggcgttgattacattgcataaatatccgtgtctccagacgctatataaaaacctgaagacatgaatgcgttatttactcaggtaatttcaatgcgttaaaagaaagctggcaatccaattgccagcttaagtcgaaacaaggagactcgatatttaaatcggattacattttaactttagtaatattcttcagagatcacaaactggttattgataacttattcttgggcagtaatccgcaaacgttaactttttgtttgctatttacaagctgataacaaccaggaatcttacttaggatcaatatatggagtgcgtgatggataaatctgaagtattgattagtgttaatagacgtattagttcacgaagggtaaagttcttataggcgtttactatattgaacaacgattcggacaaggatgtaaataatgaaaaggatgacatattcgaaacgataacggctaaggagcaagttatgatttttctcatgacgaaagattcttttcttttacagggcttttggcagttgaaagataatcacgaaatgataaaaatcaattccctgagtgagatcaaaaaagtaggcaataaacccttcaaggttatcattgatacctatcacaatcatatccttgatgaagaagcgattaaatttctggagaaattagatgccgagagaattattgttttggcaccttatcacatcagtaaactaaaagctaaagcgcctatttattttgttagccgcaaagaaagtatcaaaaatcttcttgagattacttatggtaaacacttgccccataagaatagtcaattatgttttagtcataatcagttcaaaattatgcaactgattctgaaaaataaaaatgaaagcaatatcacgagcacgctcaatattagccaacaaacattaaagattcagaaattcaacattatgtacaagctgaaactaagacgtatgagcgacatcgtcaccctgggtatcacatcttatttttaatcaggacataagcaactgaaattgatggctggcatgacgagggatgcagatgctgatttcattacccccggtgattactaaaggagaggctaaaacgactttattcccctggtatgtgtatccaccagtagaacccttcgttgcccgaatgctggcaggaactgttggcagaacggcaacattttttttgtcgttgacctcaccatgtcgatcactgtgcctgtatcccaccttactggctgacaaccccactatgccgctggtctgtaaatccctcatatctctcctcgcgcgcaatttaaagaaccgttatttctcaagaattttcagggactaaaatgaacagaagaagaaagctgttaataccgttgttattctgcggcgcgatgctcaccgcctgcgatgacaaaagcgcggaaaacgccgccgccatgacgcctgaggtcggtgtcgtcacactctcccccggtagcgtcaatgtgttgagcgaattgcccggtagaaccgttccttatgaagttgccgagatacgtccccaggtgggcggtattatcattaaacgcaactttatcgaaggcgataaagtgaaccagggcgatagcctgtatcagattgatcctgcacctttacaggccgagctaaactccgccaaaggcagcctggcgaaagcgctctctaccgccagcaatgcccgcatcacctttaaccgccaggcaagcttgctgaagaccaactacgttagccgtcaggattacgacaccgcgcgcacccagttgaatgaagcagaagccaatgtcaccgtcgccaaagcggctgttgaacaggcgacgatcaatctgcaatacgcgaatgtcaccagcccgattacgggcgtcagcgggaaaagcagcgtgaccgtcggcgcactcgttaccgctaatcaggcagatagcctggttaccgtacaacgtctggacccgatttatgtcgatctcacgcagagcgtgcaagatttcttacgcatgaaagaagaggtcgccagtgggcaaatcaaacaggttcagggcagtacgccagtacagctcaatctggaaaatggtaaacgctacagccagaccggcacgctgaaattctccgacccgacagtggatgaaaccacgggctccgtgacgttacgggcgattttccccaacccaaatggtgacttgctgcctggcatgtacgtcacggcattagtggatgaaggtagccgccagaatgtattactggtgccgcaggaaggcgtcacccacaacgcccagggtaaagcaacggcgctcattctggataaagacgatgtcgtgcagctacgcgaaattgaagccagcaaagccatcggcgaccagtgggtcgtcacctctggcttgcaggctggcgatcgggtgatcgtttccggtttgcaacgcattcgtccgggtatcaaagcacgagcaatttcctccagccaggaaaacgccagcaccgaaagcaaacaataacgttgcaggcttaaggggactttcatggctaactattttattgatcgcccggtttttgcctgggtacttgccattattatgatgcttgcaggtggtctggcgatcatgaacttaccggttgcgcagtatccgcagattgcgccaccgaccattaccgtcagcgctacctatccaggtgccgatgcgcaaacggtagaagacagcgtcactcaggtgattgagcaaaatatgaatgggcttgatggcctgatgtacatgtctagtaccagtgatgcggcgggcaatgcctctatcactctgaccttcgagactgggacatctcctgatatcgcacaggttcaagtgcaaaataaactgcaactcgctatgcctagtttacctgaagcagtgcagcagcaggggattagcgtcgataagagcagcagtaatatcctgatggtagcggcgtttatttctgataacggcagcctcaaccagtacgatatcgcggactatgtagcgtctaatatcaaagacccgctaagccgtaccgcgggcgttggtagcgtacaactctttggttccgagtatgccatgcgtatctggctggacccgcaaaaactcaataaatataacctggtaccttccgatgttatttcccagattaaggtgcaaaacaaccagatttccggtggtcaactgggtggcatgccacaggcggcagaccagcagctaaacgccagcatcattgtgcagacgcgtctgcaaacgccggaagaatttggcaaaatcctgttgaaagttcagcaagatggtagccaagtgctgctgcgtgatgtcgctcgcgtcgaacttggggcggaagattattccaccgtggcacgctataacggcaaacctgctgccgggatcgccatcaaactggctgccggagcaaacgccctggataccagccgggcagtcaaagaggaactgaaccgcttaagtgcctatttcccggcaagtctgaagacggtttatccttacgacaccacgccgtttatcgaaatttctattcaggaagttttcaaaacactggttgaggctatcatcctagtcttcctggtcatgtatctgtttttgcagaatttccgtgccacaatcatcccgacgattgccgtaccggtggttattctcgggacgtttgcgatcttgagcgcggtcggtttcaccatcaacacgttgactatgttcgggatggtgctggcgatagggttactggtggatgacgccatcgtggtggtggagaacgtcgagcgtgtcattgcggaagataagctaccgccgaaggaagcgacgcataaaagcatggggcagatccaacgtgcgctggtcggtattgccgttgttctttccgcagtgtttatgccgatggcctttatgagcggtgcaaccggggagatctaccgccagttctccatcacgctgatctcctccatgctgcttagtgtatttgtggcaatgagcctgacccctgccctgtgcgccaccattctgaaagccgcgccggaaggcggtcacaaacctaacgccctgttcgcacgcttcaacacgctgtttgaaaaaagtactcaacactataccgatagcacccgcagcctgttgcgttgtaccggtcgctacatggtggtctacctgctgatttgcgccgggatggcggtgctgttcctgcgcacgccgacctctttcttaccagaagaggatcagggggtatttatgaccaccgcgcagttaccttccggtgccaccatggttaacaccacgaaagtgctgcaacaggtgacggattattatctgactaaagagaaagataatgtccagagcgtgtttaccgttggcggctttggcttcagcggtcaggggcaaaacaacggcctggcgtttatcagtctcaagccgtggtctgaacgtgtcggtgaggaaaacagcgttaccgcgatcattcagcgggcaatgattgcgttaagcagtatcaataaagccgtcgtcttcccgttcaacttacccgcggtggctgaactgggtaccgcgagtggttttgatatggaactgctggacaacggtaacctggggcacgaaaaactaacccaggcgcgaaacgagctgttaagtctggcagcgcaaagtccgaatcaggtcaccggggtacgcccgaacggcctggaagatacgccgatgttcaaagtgaacgtcaacgctgcgaaagctgaagcgatgggcgtggcgctgtctgatatcaaccagacaatttccaccgccttcggcagcagctacgtgaacgacttcctcaaccaggggcgggtgaaaaaagtgtatgtccaggcaggcacgccgttccgtatgttgccggataacatcaaccaatggtatgtacgcaacgcctctggcacgatggcaccgctttctgcctacagctctaccgaatggacctatggtagtccgcgactggaacgctacaacggcatcccgagtatggagattttaggtgaagcggcggccgggaaaagtaccggtgacgccatgaaatttatggcagacctggtcgctaaacttccggcaggcgtcggctacagttggaccggactaagctatcaggaagcgttatccagtaatcaggctcctgcgctgtatgcgattagtctggtcgtggtgttcctcgccctcgccgcactctatgagagctggagtattccgttcagcgtgatgttggttgttccgttaggcgtcgttggcgcattactggccaccgatctgcgcggcttaagtaatgacgtctacttccaggttggtttgctgaccaccatcgggctttccgccaaaaacgccatcctgattgtcgaatttgccgttgagatgatgcagaaagaagggaaaacgccgatagaggcaatcatcgaagcggcgcggatgcgtttacgcccaatcctgatgacctctctggcctttattctcggcgtgctgccgctggttatcagtcatggtgccggttctggcgcgcaaaacgcggtaggtaccggcgtgatgggcgggatgtttgccgcaacagtgctggcaatttacttcgttccggtctttttcgttgtagtggaacatctctttgcccgctttaaaaaagcgtaacgtgtaaatgagagtaaggttgaacatgaaggttcagccttactctttcctgctaaccattcaccactcaacaaccagctaaccgtcaggaataccaggcttagtacacagcactgaaagtagaaaccactccagccattcgtcatcaatttgaacaacacaatactgacccacattcccgtaatcgtatgaattgtcagcttaataatcccaaacatgccgagtcttttcctcctgaaaataccgataccgcctggcaaactgcgaaagagaactagccggtagcccggcagaaatcatcagggaagagtttcacatgaagcaggtgtgagatcctgaccaatattcaaatgcgaaatatgtcaggaaaaggtacctgggctatgttgcgcaaactgatgtggcgttacaccataatattgtcgaaatgtgtttataaagtagcttgtactgctatagccacatttttccgcaatagtatgcagaggaatttgacgtaactcgagtaatcgtctggccatgctcatcctggaggcgagtaatattttactgaaacaggtattttcatcctgcaacttttttttgattagactctcgctggtatacattctttccgcgatatcgcgcagataccaacgtttggcgatatcaaagctaataaggcgttcaacttttccactaacagtgctgatgctattgaaaagtaaggggatcagttctttcttatgagaaaacatgcttaaacaggaaaggtagagcatattgctcagtatcggactatttaccccggattcattgaagctatcaaaaatcgccgtcaccagcggcatggggggactctggttaattaacaaacggtctttgctgtgtaaccctaaattgcgtggtagctgacgaatattttgtaagtaatggcaaactgtcagctcatcgatatccagtcgtcgcgtatccggactacaaaacgcaaaatcgtctgccaaatttttctccagcagcagaatactctcgttatgcaggcttattttttgctgttcatgataaatatcgaaactacgacgaatgaggatcacgctgcagacatgagtcatgattatcccttatatttcatactgcgattatttcaatttcagtatactaatgaaatgatgccagactgtttcttagcgcaaaaactgccagatttggtaggaccaaaatttatccacaaagtagttttgcataacagttaattgataataagtaaatgcagcacgaatatattttcgcacagcgtatagcttatgtttataaaaaaatggctgatcttatttccagtaaaagttatatttaacttactgagagcacaaagtttcccgtgccaacagggagtgttataacggtttattagtctggagacggcagactatcctcttcccggtcccctatgccgggttttttttatgtctgagtaaaactttataatcttattccttccgcagaacggtcagtgccgtaaaaattcccttgcgcaacaatacttgccgcgctgtcacggttgctcaatctctgcgcgcttcgctcctgatactctgtgggcgtcatcccataataatttcgaaagacgtaaatgaaatagctcacgctgtgatatccacaggatactgcaactcgcttaatactaaaaccatgtataacaataagttgcaaagcacgttgcattctacactcagtaagcaactgactataacttgtctcttcttcgcgcaattttttctttaacagacttggactcatcaacagctcgctggcgattcgggctagtgtccactcatgggcgatattattattgataaccgtacaaactcgtgttcgcatgttcggttgtaaaacgttcagaagcagcggtataaagtgctcatcctcaagaaaaacagataacaacgcaaagattaatgctcttttacgtagcatttctgcatagcgaagattcttattctggcttagttgcgcaacttcctgaaaaacaggaatatctctactacagtgatgaacgagtaaactagaaacttttttatgtgcatgaagatttaatgcctcctccttgagcatcgggagaaataaactaagcgtgtccctactcacgaatacaaaattttcaacacacttatctactcgaatttggcttgcatccgcaaaaaccaggtcaccgccattaaaatagcgatattcaccattaaccatggtgagaatatatttatgtcttgcatacgcaattagacaattcccatgtagactttgcatagttgacttaatattacataaacatattactgtttattaatgtagcacgccgccctcttaagtcaaattgattgataaataaatttaaacgaagcgggagaacaggatgataatgtgtgatgttctacgggcaggatgactggatttataatacaaaaacgtgtttaagaacacagggaaattaatagtaagcaaataatcccttttcgtgacattaaaggtaatcgctacatttaataaacattcatataacatatatcttatcaacacgatgaatagacagccaatatattattgcgattaataagcaaccgaatgcccagctgtttttttaaaggctgggcattcggtttttacaacgttatgttatcaggtgtgtttaaagctgttctgctgggcaataccctgcagtttcgggtgatcgctgagatatttcagggaggctttgtagtcttccagcaacagttcagcaaagtccatttcgaagccgcgacgacacataatgcgcatcaccacgatgtcggtggcttcaccgccgagagtgaaggccggaacctgccagccgcgcagacgcagacgttcagagaggtcgtacagggtgtatcccggatcttcaccatctttcagtttgaagcaaaccgccgggatgccttcgtccgggcgacccgtacagatgaactcatacggccccagtttggcgatttcatccgccagataagcggcaacctggtaagaggcgttctgtactttggtatagccttcacgaccgaggcgcaggaattcatagtactgtgcaattacctgacccgccgggcgggagaagttgatggcaaaagtaccaatttgaccacccaggtagtcaacgttgaacaccagttcctgcggcagcgcttcttcgtcacgccagataacccagccgcagcccagcggagccagaccgaatttatggccactagcactgatgcttttcacacgcggcaggcggaagtcccagacgatatccggggcgacgaacggtgccaggaagccaccgctggcagcgtcgatgtgcatgtcgatgtcgataccggtgtcggcctggaatttatccagcgcatcgtgcagcggttgtgggaactcatagttaccggtgtaggtcacgccgaaagtcggcaccacgccgatggtgttttcgtcacaggcttcaatcatgcgtttcgggtccataaacaactgaccggggcgcatagggatctcacgcagctccacatcccagtagcgggcgaatttatgccagcagatttgtaccggaccgcacaccaggtttggtttatccgttggtttgcctgcagcttccatacgcttgcgccaacgccatttcatcgccatcccgccgagcatacaggcctcggaagaaccaatggtgttggtgccaacggcctgaccatttttcggcgcaggcgcatgccacagatcggcaaccatatttacgcaacgcaggtcgatggctgcggattgcggatattcttctttgtcgatccagtttttattgatgctcaaatccatcaatttatggacgttttcgtcgtcccaggtctggcagaaagtggccaggttctgacgagcgttgccatcaagatataattcatcattgataatctgaaatgcgacatcatcgcgcatttcgtgcagcggaaatcgtttactctccgcgatagtagaaatggcctttgcgccaaaacgactatcgagtagttcactgcggaaatccgttaacagcttctggtccatttcgaactccttaaatttatttgaaggcaataaaaaagtaggatttatccgcaatggaagcaaggcattacaggcttaatttaaataacaaaatcctaagcagaaaaacgactttttataatataaacatttaacatgataatattaaaaacagactttattatcgtaataaaaatcgcccaaacattgctgttcgggcgatcaaattaattattgtttatcctgcatatacggcgtgtacaccccgttcagactgtgcaggaaagctacgatatcatccacatcctcctgcggcagctctttgcctacctgatagcgcagcatcagtttcaccgccccgtccagcgtcggcacgtcaccgcgatggaagtacggtgccgttaaagcaacgttacgtaaaccgggtactttctgacgcaatttatcacgctcttctttagtcacattcatacgaccaatatccgccgccgtaatttccccaaagttaaagtcttttttcagccccaacggttcaaaggaacgtccgccgagaataataccaccatgacaagttgcacatttattatctttaaataattgatagccttttttctgttgcgccgtcagcgcattttcatctccgcgcaaccatttatcaaatggggaatccggcgtaattaatgttttctcaaattcagcaatggcatcagtaatattttcgccactgaaaccttgcggatagacttcgaggaactgcgttttaagctgcggatctttttccagcttagcaataatttcgtcccaggatttgctcgccatttcaatcgggttcaacggcggtccaccagcctgatcctgcaatgttgccgcacgaccatcccagaactgctcaacgttaaatacactgttaaataccgtcggcgcgttaatcggcccaactgcgccaccaacaccaatgcttgtttttctgccatcgacgccccccgcattcaacgcatggcaatgagcgcaactaatggtgctatcagcgcttaaacggggatcgtgatacagcgcaaaacccaacgccactttttgcgcatcggtaggcagtttttgcgggatgggctgcaccggttcattgcgatgttccggagcagtatcattgctggcgtaatattccgcgcgctgttttgcaatccaggccagtatttccgcccgctcttcatcactcaccttacccgcccagtgtagcgcggtataacgcgttggtggcatagtttcatactgcatcacccattcaatcttattcaaatcgctttggctaacgggtttatcagccagcagtgccgcacgcacggcctcaaggttaaaagatttatatccaagcttaatgtcgtaatccatcaactgtttcgcgccaggaatataataataggcgggtaattctgcgctaggcgtgtggcaatagtcgcatcctttttcgcggagaaagcctaaaaccttattattttcactgacagcagatgcctgaacatcggcctgtttactgcgtttattatcgtggtaccacacataaccagataaccctaaatagcaaatcgcgacgccagccaggccgatcgcggtaatacgactgaccattttcattattcttccctcacggtggtgagttattgtgacccagaaaattttccagaatgctgcaaacgtctctgcgagacaaagccatcataaaaaacagggagatacgctttttgataggaatcaatcaattacatgaatataaactatcaataagatagcctgtgcctattacccagatcaggaatggcatatcatgattgcggcgagagcaggattgaatgttctgaaaatgaaaaacaacaccaaatcggtatttttataaattccattgatattagtgcgttatattttttgacaggttaataaacgtgatccaccgcacgctttgtcgcccaccaggcggagcgaatgactacccttaaagaaaagccgataattagcgacgaatttcggaggttggatccttatgctcaatcagaaaattcaaaaccctaatccagacgaactgatgatcgaagtcgatctctgctatgagctggacccgtatgaattaaaactggatgagatgatcgaggcagaaccggaacccgagatgattgaagggctgcctgcctctgatgcgctgacgcctgccgatcgctatctcgaactgttcgagcatgttcagagcgcgaaaattttccccgacagtaaaacctttcccgactgcgcacctaaaatggacccgctggatatcttaatccgctaccgtaaagtgcgccgtcatcgtgattttgacttgcgcaagtttgttgaaaaccacttctggctgccggaggtctactccagcgagtatgtaagcgacccgcaaaattccctgaaagagcatatcgaccagctgtggccggtgctaacccgcgaaccacaggatcacattccgtggtcttctctgctggcgctgccgcagagttatattgtcccgggcggccgttttagcgaaacctactattgggattcctatttcaccatgctggggctggcggaaagtggtcgggaagatttgctgaaatgcatggccgataacttcgcctggatgatcgaaaactacggtcacatccccaacggcaaccgcacctattatttgagccgcagccaaccaccggtttttgcgctgatggtggagttgtttgaagaagatggtgtacgcggtgcgcgccgctatctcgaccaccttaaaatggaatatgccttctggatggacggtgcagaaagcttaatccctaatcaggcctatcgccatgttgtgcggatgccggacggaagcctgctcaaccgttactgggacgatcgcgacacgccgcgtgacgaatcctggcttgaggacgttgaaaccgcgaaacattctggtcgcccgcccaacgaggtgtaccgcgatttacgcgcgggggcggcctccggttgggattactcttcccgttggctgcgtgatactggtcgtctggcgagcattcgtaccacccagttcatccccatcgatctgaatgccttcctgtttaaactggagagcgccatcgccaacatcagcgcgctgaaaggcgagaaagagacagaagcactgttccgccagaaagccagtgcccgtcgcgatgcggtaaaccgttacctctgggatgatgaaaacggcatctaccgcgattacgactggcgacgcgaacaactggcgctgttttccgctgccgccattgtgccactctatgtcggtatggcgaaccatgaacaggccgatcgtctggcaaacgccgtgcgcagtcggttactgacacctggcgggattctggcaagcgagtacgaaaccggtgaacagtgggataaacccaacggctgggcaccgttacaatggatggcgattcagggatttaaaatgtacggcgatgaccttctgggtgatgaaatcgcgcgaagctggctgaagacggtgaatcagttctatctggaacagcacaaactgatcgaaaaataccatattgccgatggtgttccccgcgaaggcggcggtggcgagtatccgttgcaggatgggtttggctggactaacggtgtggtacgccgtttaattggtttgtacggcgaaccataatatttttacagccagccgctaacttcctgctggctgtaaaattatcctcttcaggaggagatatttaacatcattgccgcctgggtgcgatttttcacttccagacggcgatacagggattccagatgcgcttttaccgttccggtactgatattcagcgctctgccgatctccttattactttcgcccgccgctaacatggttaaaatctcccgctggcgggcgcttaagcttttgagatctttaatgtccttttccggcgtcgtccgccagtctccaggcagaaacatcatccccatcgccgcactatttaccgccaacgcaaatgtctcgacggtactatcacgaggcacaatggccagcacattaaaatggataacttcctgtaaccaccgtttattgcaatccgtcgccgtaattaacaccttaacctcaggaaattgcaccacggttttttgcagcaaccagtagcaaaactcaccatcctgatcgccatcgagcataactaaggcttcagggtaactttccagcttttgccataactcgtctgcctgactggccccctgaatactcactcctggaatacgctgctgtaaactgattttcattccatgaataaatatactctgcctgtcaaacatgactatttgcataactgaatctccacctgaatacgttaaaaagacttaagtagtggaagggtattacccgcgagaaaaaataagaattcgccatttggcggtggccattctacagagatgacgtgtagaaaatagttaccgatataaatagttacagctaaacgcctgaaattacatgtcgagggcactatttaaaacaattttgaggatttccttatattggtggttagtacgcatgcaattaaaaatgaaattccgcgaccacaagccaaaataacaaacggcaaggagacaaaaataagcacaaatagccaacacgtcctctgttcactttaaagggaatcgctgaaaaatacgctctgtttaaggggattcacctttctcagaaagctattccgcccttttcctgctgagaaatcgccacattcggcatgacaacattgtgaaacccggcattagatgttagaaaaaacaataaacaatgcgatatgcgcgttactgtttcgctgtgaacaacaaagcgtcaaagaaatggataaaattcacgcaatgcagttgttcatcaaagtcgcggagctggaaagtttttcccgcgcagcggatttctttgctttgccaaagggaagtgttagccgccagatacaggcactggaacatcaacttggcacccagcttctccagcgcaccacgcgacgggtcaaactcacgccagaaggcatgacctattatcaacgagcaaaagatgtgttgagtaatctcagcgaactggacggtctgtttcaacaggatgccaccagtatcagcggtaaattacgcatcgacatcccgccaggaatcgcgaaaagcctgttactgccgcgcctgagcgaatttctctatctgcatccgggaattgagctggaactgagtagccatgaccgtccggtagatattcttcatgatggttttgattgcgtgatacgcactggcgcgttaccggaagatggcgttatcgcccgtcccctcggcaaactgaccatggtcaactgtgccagtccgcactatctgacgcgctttggttatccgcaaagccccgatgatctgactagtcacgcaatagtgcgttatacaccgcacctgggtgtacatccgttaggttttgaggttgccagcgttaatggcgtccagtggtttaagtctggcggcatgttgacggtaaacagtagcgaaaactatctcaccgccggtcttgccggtctggggattattcagatcccgcgcattgccgtgcgcgaagccctgcgtgccgggcggcttattgaagtattacctggctaccgtgccgagccgctctcccttagcctggtttatccgcagcgtcgggagctttcccggcgtgtaaacctgtttatgcagtggctggctggcgtaatgaaagagtacctggactgaccgactatactttttaagaatgaccacgacagaaggacaaaagagcggatgacgcaggaaaacgagatcaaacgtcccatccaggatctggagcacgagccgattaagccgttggataatagcgagaaaggcagcaaagttagccaggcgctggaaaccgtcaccaccactgccgaaaaagtccaacgccaaccggttattgcgcacctgattcgcgcgacagaacgctttaacgatcggctgggtaaccagtttggtgcggctatcacctatttcagttttttgagcatgataccaattttgatggtgagctttgccgcagggggctttgtgctggcctcccatccgatgttgctacaggatatcttcgacaaaattctgcaaaacatcagcgatccgacgctagccgccacgttgaaaaacaccatcaacaccgccgttcagcagcgtacgactgtagggcttgtcggcctggcggtggcactttattccggcatcaactggatgggtaacctgcgtgaagcgattcgtgcccagagccgcgatgtctgggaacgcagcccgcaagatcaggagaagttctgggtaaaatatctgcgagattttattagcctgattggtttgttgattgcgctgattgtgacgcttagcatcaccagcgttgccggtagcgcgcagcaaatgattattagcgccctgcacctgaacagcattgagtggctgaaaccgacgtggcgattgattggcctggcgatttccatcttcgccaactatctgcttttcttctggatcttctggcggttgccgcgccaccgtccgcgcaaaaaagccctgattcgcggaacatttctggctgctattggttttgaagtgattaaaatcgtgatgacctacaccctgccaagcttgatgaaatccccctctggcgcagcatttggttccgtgctggggctgatggcatttttctacttcttcgcccgtttgacgctgttttgcgcggcgtggattgccaccgccgaatataaagacgacccgcgaatgccggggaaaacgcagccttaaaataggccggatgcggcgtaaacgccttatccggcatacgattttattcggcctggctccccgtaggccggataagatgcgccagcatcgcatccggctataatgcgcacataacctcttgaaactcgtccccagagcctcttcagccatctatttgggagcaaacaatttcattccaactcataaccccagcatataaatccagttggtaacttttatttaacctgaaaccagttttatccactatttataaaattatgtgaagcatttcatagaagaaaaatcactggcctaaacattatcccctttttgcctgatttttgaccatttccgcgatttgttacacattgaaatatcacttttgctgtgcgtaatatggctattcgttagccaaaaaataagaaaagattatgcaagcaacagccacaacactcgaccacgagcaagaatacacgccgatcaacagccgtaataaagtccttgtcgcctctctcattggcacagccattgagttcttcgacttttacatttacgccactgcggccgttattgtgtttccgcatatcttcttcccgcagggcgatcctacggcagcaacgctacagagcctcgccaccttcgccatcgccttcgtcgcgcgccccattggctctgccgtttttggtcattttggcgatcgcgttgggcgtaaagcgacgctggtcgccagcttgctaacgatggggattagcaccgtggtgattggtctgctgccgggctatgccacgattggtattttcgccccgctgctgctggcgctggctcgatttggtcagggtctgggcttaggcggtgaatggggcggcgcggcgctgctggcgactgaaaacgccccaccgcgcaaacgtgcactgtatggctcctttccgcagctgggcgcaccgattggcttcttctttgccaatggcactttcttgctgctttcctggctactgaccgacgagcagtttatgagctggggctggcgtgtgccatttatcttcagcgcggtgctggtcattatcggcctgtatgttcgcgtgagcctgcatgagagcccggtgtttgagaaagtcgctaaagcgaaaaaacaggtgaagatcccgctgggtacgctgctgaccaaacatgttcgcgtaaccgtactgggtacgttcattatgctggcaacctatacgctgttttacatcatgacggtctactctatgacctttagtaccgccgccgcgccagttgggcttggcctgccgcgtaacgaagtgttgtggatgttgatgatggcagttattggttttggcgtgatggtgccagtcgctggattactggctgatgcctttggtcgccgtaaaagcatggtaatcatcaccacgctgatcatcctgttcgcgctgttcgcctttaacccactgctcggttctggcaacccgattctggtttttgccttcctgctgctggggttaagtctgatgggtctgaccttcgggccaatgggtgcgctgttaccagagctgtttccgacagaagtgcgttacaccggagcaagcttctcttacaacgtagcgagcattctcggggcttccgttgcgccatatatcgcagcctggttgcagactaactacgggctaggtgcggtggggttatatctggcggcgatggctggcttgacgttaatcgccctgctgctgacccatgagacgcgacatcagagcttgtaataagagtgaaaagcctgatgcgctacgcttatcaggcctgaatttccatacaatatattgaattcgcaaggatttgtaggccggataaggcgttcacgccgcatccggcatgaacaaagcacactttgccaacaatctaaatctgtttaattgccggatgtcagacatccggcaattatcatcacttcttcatctggctcaaaatcgtccgacactgattagcctccccttcggaaggactgatcagtgccagtaacgccgccgccggtgttaccagcgttgccagtgccgcagcaacagcaccacgggcaatcagcggtccggctttcaccccagcctgcggatttttaaacgtcccccgcacatacagcgggctacgcagtgtgataatccgaattcctttactctccggatcaatagtcaaatccagctgttcgctagcaaaacttgccgtgccggtaacattaatcaacgcgttctcagtatcgaaagcaaaaatctgcgggcgcgccacgccgttggcaatattcagattcgccgccgcgcagttcacccgcacctcatcatcaccaaatatcgcaccgacaatgtagttgccgacattcagcccaacaatctccatcaggttgcggctcaccagcccgtcattcatcaacagtttcaggttgccgttactgttgcctaaaagtgccgccacgctgttaccgctaccgcgtagttccgcgtcaccgttcatttcccccagcgtcttctgcatcagttccacatcgggcatcagttctttcagtttcagtcgacgagcctgaatatctgcccgcccctgcatcggctttttatcgccttccagatgaatattcgccgcaatgctgccgcccgccatgccaaatttcagcggttgcaggcgcaggtcagcatttttgaggatgatatgagtagaaagatcgctaatcggcaggctactgccatgctcaatgcgccgccctttgaagcgaacatcggcatccataacgtcccatttatcggtttcgaagcggtcataaggcagcactttgcccgcaggctgaacgcttttttcgcccttcttctgttcagaccgtttgctcttttctgcccctttcccggaatcaacgccaatcaacggtcccaggtccgccagccgcaattgccggctctcgacatcaccttccagttttggtcgtggctttccggtggtgtagaccagagaaccgtggatatcgctatcaccaattcgcccattaaaaccgcgataatcaaagacgctgcttttttcagtgtcgattttcgctaccagccgaccatccgtttcaaacggcggggtatcgggcagcagaacgcccgtcagttcatagagatcacccagactatcgccagaaaatttaagccgtaaatcgacaccgcccatcttcattgggtcattcacgacgccatcaaaagcaacacgggtgttaccagagcggaaatcagcctgtaccggaaacggcgtcccttcgccacgcagcgccagcataccgcctatttttcccgtacccgtgagcggttcaccgttatatcgtccctgcgccttcaggccaaaaacgtaatcgcccaccttttctttatccgctttacctttgcttccagtaacttcgctgaacggcagcggcttgcctaagggatcaacaaaaatctccagatccgctttgcttactttgtcatcaatggcgatccgcccttgatcgaaaagaatattatccagccgaaagctccatgcgctcggctttgcattcgcgtctttgttatcatcgttggcaagattaaacgtccagttattgttcttttcagagaggcgaatcaggcgcgcgtcgggcttttcgagcttgatccacggcagccagaccgttttggtcagcagcgccagcggggccagcgttgcctctacgcgtggcaaatgcaccatcgtgacttcgggaatatccggtggattgccaagaatgatgtcttccgcgtgtacatggggccacggcacccagctgcgccagccagtttcttgtttttgccgctcccacaccacgcccagatcgccacggatagcgaacggacgattcaactccgcagagactttctggttgatagtcggtttgagtcgattccagtcaaaagttgcaatcaaaatgatcgccacgacaatcaacaacaagaaagccccactaatcgcagcggttattttgcctgccttgctcatcgttcgcttcctcatattcttcctgtgccagtcctaaagatagtccagccaggcggaaaatgaggcagcttatagcgccagaaccgccgtattcagcgtttctatcggtgccgggcgactaagaaaccagccttgtgcggcgaatgcggggctgttctgaacatcacgccactcttccggcgtttctacgccctcgacaatcaccccgcgacaatagcgattcattagatgtaaaagctgagaaaagagtgtgcgtccttccgggctctgacgcagcatcacaaacagttctcgcgcgattttgatgtagtcataacgcacttcacttagcgcagagaaatttgccatcccggtaccaaaatcatccagccacagcgggccaaattcacacatgctggcaaaggtactatctttcggcagacggatatgctccaccagttcgaaacgcagccagggaagacgctcaatctggcgcaggatttttggttgctgacgcagggcgatgagcgtagggccatcaatattgacgcttgccagcaggccgtgctctataaagaagtcggctttttgcgccagcaaatcaatctgctctttcacaacctccatccgatggctgacggtgatttcagtaaaatagcgatccggcggcaggcgttggctagggttcaagggatgcgtgaccaccgttaatagctccacggccattaaccgcccgcatgtttgatagatcggctgccaggtgtaagcacgctcacactgcaaccaaaaacgccgttcctgcaagctctcgatgcttgcttcagggttgcttattcgctggataacctgccttatcatcaaagatgtcctgtgtttaaaagtgatgctgcccggactcgacaaagattatcggcgcgtaagggcagaactttaccgcctggccggggtaaatttcctcactccacaacggaatctttcaggaatacgttctggctcaaaaaaataatggaacactgttttaatatggttgaccagcaaaccaccacagcgcaaactaacgctaattttttacagatcaggttcacgactatgtccaaaaagattgccgtgattggcgaatgcatgattgagctttccgagaaaggcgcggacgttaagcgcggtttcggcggcgataccctgaacacttccgtctatatcgcccgtcaggtcgatcctgcggcattaaccgttcattacgtaacggcgctgggaacggacagttttagccagcagatgctggacgcctggcacggcgagaacgttgatacttccctgacccaacggatggaaaaccgtctgccgggcctttactacattgaaaccgacagcaccggcgagcgtacgttctactactggcggaacgaagccgccgccaaattctggctggagagtgagcagtctgcggcgatttgcgaagagctggcgaatttcgattatctctacctgagcgggattagcctggcgatcttaagcccgaccagccgcgaaaagctgctttccctgctgcgcgaatgccgcgccaacggcggaaaagtgattttcgacaataactatcgtccgcgcctgtgggccagcaaagaagagacacagcaggtgtaccaacaaatgctggaatgcacggatatcgccttcctgacgctggacgacgaagacgcgctgtggggtcaacagccggtggaagacgtcattgcgcgcacccataacgcgggcgtgaaagaagtggtggtgaaacgcggggcggattcttgcctggtgtccattgctggcgaagggttagtggatgttccggcggtgaaactgccgaaagaaaaagtgatcgataccaccgcagctggcgactctttcagtgccggttatctggcggtacgtctgacaggcggcagcgcggaagacgcggcgaaacgtgggcacctgaccgcaagtaccgttattcagtatcgcggcgcgattatcccgcgtgaggcgatgccagcgtaaacgcagcatatgcaaaaggctggataaagtgttacccctctatccagctcatccataaatacctgatggttgtgctaactcatcaccatcaggcattactgtgcaggtggaatatccgtcacttcaggatgtacgtcatccgtggcgacagaggtggtcgcagcggcggtagatggggccatgatttgatcccagaccgcctgcaacgctttcatgttaaattccggctcgcctttcggctgcagcagtattaacgccatatcattgctcaactgttgacgcagatcctgatttaacatctctaccgtcaggctattaaggaaatcctgccgcagtttctgatattgctccggcgcgatatcgacaacctgattttgcaagctacgcatccgctgacccatcagaatatcggtatcagctcgtgcataggcggcaaacagtttctgcagctccagtttcttttgcgccactaacgcattgaactcttcttccggcagacctttatcgcgaaccttcgccagttcacgcgccaccagattaaggttgctgttcagcttgtcgtttggactttcgatgttgatggcacactgcgcacgcagatacagcacacggcagtcaaatccaagaccgatgtctttgctgttactggcacttaacgcttgctgaacatgccagaacagcgcctcgcgggccaggtccgcacgccagtagcgcagcagtgcggcactttcacgaatcggctgccacggcgtatcccacatgatagataaccggtcctgacgcaccgcgtcagtcataatactcaccgcttccgcacgcagcggagaaagcgtcggcaccggagctggcgtttcacgtttgcctttcagttcgccaaacgttttgtttatttggtcgacaacgctgcgcgcatccacgtttcccaccaccagtagcgtcattgcatccggggtgtaccatttctgatagaaatctttaattttttccgcttcaacgggttgtttcagcggatcggcaggatcgtgacctaacaaggtactccctttcagacgatagcgccaccagccctctttagtatcggcaggccaggttgccaccatgtcctgactttgcagcgcgtggttgatggtttctggtgtgatggtcaatttgccagtggcatttgccagataagagagcgcttctttcagcaaatcgttacggttattgggcaaactcagattaaacagcgtggtgtcataagagacaattaccggcggcatcgggcgtttagggtcgatcccctgctgccacaaactacgcgcctgtgctgcgtcaaggccaccgctttgcgttagcgcaatacgagggatggcgtgactgtaaccgctctgttgtgtactttcggcgaggctaccggtattaaccagcaggcgaatttcaacacgatcgctgggacgctggggggtggtcagcacttgccactgtaaaccgttggaaagcgtcccctgttgccatgctggatcaggctggagcgcatctgcctgcacatagccagcagtggccatcatcagcaaaccgcccgctaaaagtcgaatttttgtgccctgcatgtgaacccctgatcaactatcctggtaataaaaaaactgcccgttgtcggtcagtctaaatgacgttaaaaacacttcgtgttagaccgcaagaacatgaaaatgtcacggaagaagtgaaataaacctgaactcacccaggtggtaagttcaggcacaggggtcaattatgcgcaaacacccgcactcggggaagggagtgcgggcataagtgatgagattaagaggataattcgtgcgttttgccatccggcgcacgattattcagcacatcgtccagttttttgtggtccagttctttcacccacttagcaacgacaatggtcgctacgccgttaccgaccaggttagtcagcgcacgagcttcactcataaagcggtcgataccgaggatcagcgccagacccgctaccggcaaatggcccaccgcagagagcgtcgccgccagcacgataaagccactacccgttacccctgccgcccctttagaagaaagcagcaacacgattaacagcgtgatttggtggacgatatccatctgactgttagtggcctgggcgataaacaccgccgccattgtcaggtatatgcttgtgccatcaaggttaaagctgtagcctgtcgggatgaccagccccaccacgcttttacggcagccgagtttctccatcttgtcgagcatacgcggcagcgcgctctcggaagaactagtccccagtacaatcagcagttcttcacggatgtagcggataaatttgaagatactgaaaccagtcgctttagcgatactacccaataccagcaccacaaacaggatacaggtaatgtagaaacagataatcagctgccccagttgcaccagtgtgccgacgccgtatttaccgatggtaaacgccattgccccgaacgcaccaataggtgccagacgcatgatcatattgatgatgccgaagatgacctggctgaaactttcgatgacgttaaaaatcagttggcctttgctgcccagacggtggagcgcaaaaccaaacagtacggcaaacagcagcacctgcagaatgttaccgctggcaaatgcgccaatgacgctcgccgggatgacatccataatgaaggcgacaatgccctggtctttcgcctgatcggcgtaaaccgctaccgctttcgcatcaagcgttgccggatcgacgttcattccggcaccaggctgcacgacgttaacgatgataagaccaataatcagcgcgatggtactgacaatttcaaagtaaagcagtgcgactgcgccggtacgaccgaccgccttcatgctttccatgcccgcaatgcccgttacgacggtacaaaagatgacaggagcgatgatcatcttaatgagcttaacgaagccgtcgccaagcggtttcatttgctcgcctatttcaggatagaaatggccaaggagaataccaatggctatcgctgtcaggacctgaaagtaaaggcttttaaacagagaggttttcatagggtgtcctttagtaaaaccacaggtcttgtaaggttatggggtacctgcggccttaaaataacacccagacaacatcacagaaatgtacctggatcataattgaaacaaaaaggttaaaaagtttgagctggctcgcacaaaccagcactttttaaagttttgtaatcagtttggggtagttacttttcttccaggtaactctcttcgaagatttcaatagggagtgggcgagcaaaaaggaagccctgggcaataccaacgcccgcttttgccagccagtcgcgttgtgcttcagtctccacgccttcggcaatcatttgtaagttcaggctctgcgccagcatgataattgcagcaatcatgctgctatctcccggcaagccttcaacaaacattttgtcgattttcagtacgtcgattggcaagcttttcatatgctgcagctgacgcagccctgcgtagcccatgccgaaatcatccagcgccacccgaactccggcattgcgcagcggacggaggattgccaccgcagcatgagggtcgtcaatacgtcggctttctgtcacttccagaatcagtgttcccggctgaatgcgatagcgggttaacagttccagcatatccgccaccatattcgggtgcatcagttgcagcgcagagaggtttacgctcaagggcagcataatgccgcgctcttgccaggctgcaagcaatcgacaggactcttccagcacccagtgaccgacggtaaccatcagcccacagcactcaatgcgatcgattaagccatccggcaggtcccaactgccatccggttgctggatacgcagtaacacttccgcactgaccagtttaccgctggtcatctcgacctgtggctgtaaccaaatagcaaactgatgattttccagtgcattaaggatatcgctctcttccgtcaaccgcttctgggcggcttccatctgctgcggatcaaagaactgaatctgattcttgcctttatggcgagcggtaaatgccgcagaaatagcgcgactgtaaagctgttcggcggtgagatcgccgtagaacatcgccacgccaatgctacagtgcggacggagttgaatacgttcaatcggcaggcgctcgctcatgatagtgagcacttgctgacctaaggtgattgcgtgccacggttcctgtacaccgttggcaatgacagcaaagtcataaccgctaatctgcgcgaggatcatacgtgggctcagtacgcttttgagtttttccaccagcgtcagcagcagaatttctcgttgcgcctctttcagcacgcccgcagtatcacgcagggtttcacaggtgatgatcatcagcgcggtggtttgtttacgcgcgacaacctgctccagcatctccatcagcaaggctttgttcggcaaatcgctcaccgggaagcgcatcgcattttcgttctgttcttcataatggcgctgcagcaattgctggttgaggttgtaactgcgcaccaacataccgatttcatcgtcctgatgcagacgcggtaatgccagttggtgaccaacaagctccttggctgggatggcgttaagttcgcgagcaatattgcgtaacggatgcaaaatcaggcggttaatgcaccagctgatggcgacggtcaggataaggctcaaaagtaagtaaatggtcactaacgtactgagggtgctcatcacgaacttatacatacggaaggaatccgcctgtagtaccagataggcaattggctgcgggtttgccggacgttcgaggctgtaaacgcccaggctgatttgaaccggtagctcaaacaggcgagtaaccattaccggcaccgggcgctctggaataaaacttttacgcagcgcctggaactggttaggcagcactacatcggcacggctgaccacgcctgccggtttaatgctggcaagaatagcttccgcttcgggaatatcgcctttcaaaatagcactagataagggttcgcggacagagcgagcaatgctttccagttgcgtagccgtgttatagcgattctgctggaccagatggaacagcaaaacggtgcaaaaaataaaaacgaacaccaggacaacggctgccaccattgccatctgcttgattgttaacgagcgacttacgcgcaaattgtctccccccggaaatcccagattgccgcccgagtatacccgatcgcagcggcattaagagaggcgctatctgaaaacttaccagtcggcgtaaggtatcagcggctgcggcggtaaatccatgtcaccctgccatccggcggcggaataacgtacgtagagcaggaaatggctgggtgcgtaatctttcgcctgctggatatcaattgccgtgccaacaaaccagttggaagtaacacgtcgttcaagtaatgcccgcgccgtgtagccgaagccctgactgctgccgccatcgttggattgccgcgcagcttcttcctgccagtcggtcgggatcagattcatcagcggataacgcggcatggttttggtgcgactatggctccagctgccagacgcacccagctcccagctccagttttccgtgcgctcccgccacatcaccggtatggcaaagctcaggtattcctgcggactgtagtaaccgccctgaccgagactgtagccactcagatctttgtcgtaatgccagatcatgttgttcaggccgattgtgacgcggcgattgttctggttaatgaccttatagtaatagcccgtcatccagcgcacgcgccagttatcttcgacatttttaccggttaactggtcgccactaaggcttgcccagacgccgtttgcttcacctttatcgtagctcagacttagccccacaccgtcggcacgtacgccaccccattttttcccggtattgctcggggagtctttttgcccaccaaaggccagcaaagaactggagatgggccgacggtgggcgttaacggtgtaacccagcggcccgatatcatcgctgtaactgatgccgccgaccacatccaccacgttgaagcccatcggcgtggtaccgatatcccagctccagacgtcatttcgccagccgaccgccacgctggcaccggaatcgctctggctgcggttgccgctacagtcctgtaatgtacaggtgccccagttgtcatcccatttgccatcggcattagtggagaaactgccgacgttcatattgacgaaatcactgcgaaagaacatccgcccgtcagaatacggcgcatccacctgcaacatggtagtgtgcgctttcagatcggagtaaccaccggtgccgctgctaccccagtaatcgtgctcaagggtgacgttaagatcctgctggcgatagaggtccgccgcatcgctgcgcacgccacgtttcagccagtcatctttctcgtcgttacgggtcagtcgggtaaaggtgtcgttatcctgcggacgcgtcgtagtcacaccggatgcgaccatggcgtctttgtaggtttccagcgcctgcgttggatcgcccgcctgcgcttcaaacttcgcaccatcacgcagcaccatcgcgctttccatgctcggtggctgagattttgcctgcgggatcaacttattaaacgtccgctgcgctgctgcggtatcgccaagctgcgcctgtgccagcgccacgcgccgctgtgtgttcaggctggcgttatcggtagcgggcagtttcgccagctggctacgtgccgccgctttgtcaccggcagcaatatccacttccgtcagaccaagaatggcgtcggcgttagctggctcccgcgtcaggacattctgatatgcagcgcgggcggcggtgtaatcacgtcgttgttgcgcccagtcagccagcgtgaggtcaatacgcgtggaaggtggttgctggcgcagcatcgcttccgcttctgcctctttgccgctttctcgcaggcggttagcggtttccagcacctgatcgctttgcagtcgattaaccagctcctgaatattgctgttccactgcgcacgcggcaggctattgatatgcgccagcgccgctctgtcctggtcatgaccagagaggtacagcccgtaagcgtaaacctgctccgggtcgttgctcttctgctgcgccagattgcgcattaacgtatcggcctggctgcgttgtccggcctgccagagatcctggctaagtcggtaagtaatccatacgctgccggggtccagcgccagtcgttgccgctgaagtgctgccgcctgcgcccatttgccctggttttccagtgcctctgcctgctgtgccagacggtcgttttgcaggctgcgttcgatatcatcaatgctacgccgctgactggcagagaggctggcgataaacgcttcagctttttctgggctttgctggcggtaaatatttgccagcccgcgcacggcgttagtgttgccgctgtccatacgcaaggtctgctgataataacgttcggcggcgggataatcttttcgcgccatcgccacatcgcccagccccagcactgcataactgtcggtgttatcgacattacgcgcctgctggaacaggcgttctgcccggtcaggattattggctttcagcgcagcatcgccctgctggatcgccagccagtagcggtttactttcagcagactgttccatttgtcgttgttgctgctgtgcgggtccagtgcgagggctttttccagattcgccactgcattggcgcgatcgcctttctgagaatacgcctggcccagcgcccccagagcttcactgtctttcgggttcgcccgcaccgcctgttgtagttcgggaatggctttacccgccataccagagtccaccgccgctaaaccttgcgcacgagcgcggaaagcaggatcggccagctgtttttgctgttctgccagttggctttgcgcagccgccacgctatcgccatcactaaagatgctgagatattttttcagcgcgctcacactggcatcactgacgggcatgtctttaatctgcccgtaccagattttagaggccccttcgcgcccggcgttgctttttgccatctgttccaggacggcaaaaccttcgtcacggcgatcgctactaaacagcaatagcgccagattgttttgcaggcccgtattgcccggtgcatccgcattgatgcgttttaactgattaatcgcttcgccacggcgagccggaattttcgccaccgtactccagtactcgacagcaatgtcaccttccggcggcgcaccgttgaacagtttgttgtaactcgccacagcttcttctgcatgaccggtcgtcgcctgcaatcgtgcctgttgcagtgcctgacgaccatccggcgtggaaagtagcatcgtagtccggctgcttttatacgcattactactcggcgctaactggctcagccgatcgagctgtttttgcgcgccatcaatatcgccctgacgtaacaaagaacggaaacgggcggcaacgacgtccgggttattcggatcaataagttccagccgatataagctctgttgcaccagatcttcacgatgggtcgcttcgcctaaccgaacttgctccagcaactgttgctgagcggttggtgctgcctcgaccatcggcatgacggccagaccgagggaaagcgtgaatatgtttagtgtgaatttgcgcattcctggccccagtcaggtaattactttagtgactatttgcgcattcctggccccagtcaggtaataactcaccttttgtgctgaagcggaaacggtgttgatcccagccttgtccaaacagggtcagcacatagttgtaataggcatcgctgccgggaaagttatcggccacgcgctggcgctgaacggcctgcgcatcgcggttttgtaaaaagggcagcatggcggcagaaaaaccgactggtcctttaccctgcgctttccccgtagccacatccactttttccggcggataaccgtttttctcagtgaatgtcgccatcggtttaaaccggttgagcatccgcgctttttgcggatcgctgtcaggcatcatgcctacccacatgtaaacgcggatagcgtcgtagctgctgatcaatgttttttcggcttttagctgccagcctttgtctttctcatagcgcacccagtctgggctaaaacctttcggggcggtttccagcaataaacgttgattggtttcgcgcagcgtggtccacggcgcgccaaagcgggtgaaatactgcgccagcgtcggcggcaggtagctggggttaaaacgccagctgttatcctcagcaaaacccactttgcccggtaacaacatggaacccagcccaggcaccgtcaccacttcctcccgcgcgatacgttttagcaacgcgctgccgatgtcggtataacgctgctctttccacaaacgccccgcctccagcaagctccaggccatccagacatcaccatcggaggcgctattgctgtccagcacttcccacttactgttctctttcttgccccacagccaggcgggcaaacgttcttttaaagaaccctgagcgagattgttctgcgtccagtcgagaatattatcgaaagctgcacggtcgttagccgccagggcagagaacatgccgtaactttgcccttcggaggtggtgattttgcgcgcgtcgctggggtcgatgacgcgcccttcctgactgatgtaatcctttttaaactgctcccaggcaggccaggtacaggctgcctgaacactaaaggcagccagcagcagcatcgtcacgattccactacgcaacacattcatcttcaattactcgttatccgggttaagacgacgacgactaataattcgcagcagacgccacagtacccatgccagcaatatcacactgatagccgccagcaccgccagcagaatcggatggtttgccagcgcataccacacgcgctcgaaccacggcagatgacctacgtaataaacgtcgccaacacgtaggctgttgataccggactcgcggatcaccgcgacgctaccgaacatggtggcgcgtttgccgctatcgttcaccgcatcgttaagcatttcataaccgcgtgggctatctgccaacagcgcaatcacgctgcgctggtcgttatacgggctctggaagccaatcaccgccgccatcgcaccggaagaggtcagcgtactccgggtttctgccgcgcgatcgctctcgtccggcacaatgccggggaacggggtctggcgcatcggtgttttcacccagctttcggtcgcctgcaccaataggtcgatctgcttatcgtctttcagtttgtccgggataccaccgatgatcatgatgtcggcatctttgccctgaatggtgctgccatcatcggtcaccgtcagattaatcgccgggaagcccgtctgtgcgccgataaaaccaacagtattcagcaacgtttccatctgtgcttcgttaggcgctttcggcatcacggtgatggtttggctcagatccgccatccggctgaatgggaagcccgcgttagcaaaggcgcgtagatccggcatcgggatgaagtggtaatacttgctgaagtcgatggtggagtcgtcaccaatcaccacatgattctgcaccggctggaaggtaatacagttatccacgctaccgcccggcatcgggttcatatactcaaagtcgaagcgcagctggttggtcgcgcccagtttcagcgccggaatagagacatctgttttgccatccagcaaaccttgtaataccggaatccgcagcagcaggcggttcgcctcctgtttgctgctcaggttgaaggattgcaggaactggttattcaggctgatatccatccggctactgtctttcaccggcggcatggtgtagcggtaattaatatccatatcaatgccggtactgcgcatcaggtagagatccggcggcaggtttaggctaacgttaatcgctgctggctcaagaccgctggattgtaactgttcttcataggttttcagttcgccaaatgtgaccggacgatcggtacgtacccagttcggcgcatcgtacggcttacgcggtagcagcggtttcacttcattcactaccacgctttcaccacggaacagaatgttaccctgagcgatacctttcgctgcctgcaacaggtctttgtcgtcacgaccaaacaccaccagcagtttgacgtaaggattctgcggatggttaatcatctcaatcaccggggcttttaccgccggatgatcgcgcaggaagtccggccgtttgtcgttggttgcaaagacaatggcattgcgatccggcagttggttatagagtaccgggaagttctgcccacgccagccagaacggctaccaaaccagctggcgacaatggcagaggcttgttgcagcccaacatccggcgcacccgcaaagaccatcggcaaggtgttggtgcggttatcgctcgggtcaaagaatggcaccgggaagtgactcaggtcattcttcacattcagggtctgataggtcagatccagtccactgctccgcccaacatccagccaaagcgtggtgctggccggtttttcgcacacgtcctgataatggccgacaaactccagccgtacacggttgaagtcgctaataaacagtgggttaatgggcatttgcgccagcgtttttttacccaactgttctttggtcactggcagcacgcccatcagttcatcattgagataaacctttaactggctctggacaggcagtaagcttgggcttggggtgtattcgaggttgagcatcgccttcgtcaccacttcatcgctgcgcataccaaactcaatgctgccgttcgggttaatgccacgtagcaccatgctgcccggcggcggtgcaatttgcgcaaaggtcagcttcacatcacggctaggaccgttctgcgccacgactggcgcatcagcgccctgcacgcccggcatcacttgccccacctgcggattttgttccgtctgggcggctacagctggctcagcattgatcagtggttgcgttgctggcgtcgcctgcgtcatgaaagaggggaacgcactcatccccatagccactgcacaaatccagaatagttttcttttcatcgcgttatcatcattgttgagccaaagcctgatcgcttggttgtgccgtttcgctccgctccgggcggcgcggaataaagcttacaacccaggaaaccagagaagtcagcacacggaatatgcccttcacgctagaaggcgcaaactccgccagatggcggtagccacggaagccgagcttcagaatatccagcagactttccagcggcttatcttccgggtagctgtcctgccagagcgcccatgtatccgcacgggcaaacgtacactgcacaaaatcgatatgttgctgggtggtgagcggcattaatttcagcccaacttcattacccatcacgcgcgccacctgggtcgggaagacgtattcctgctgaccgcgtttaagcaacagattcactttctgcccttccagaatctgcgcctgaccgttgatcttgatccccaaaccaccgtcggagaaatcctgaacggtacagctgaagaggtgaccatcttcgcgggcaattgccgcgggcatcgtcatctccacgcggtggcttcggcgtacctgtttgctttctacgcttaccgcaactgcgccgccaagaacaatcaggttgtagaacacccacaccatactgacgaccacggtgagcatctcggttggcgggccatagaagtagcgccagatgcctaccgcaacgcccaccaggttgagcaggacaaggaagatgtagggccggctgatcacccagtcgacgtactcttcttccaccagtccacctttggcggtgacgttaaatttgcctttgtgcgggttaatcagcgccaccagcgtcggtggtgcgatataccacgccagcaccgtttcgtagatttcactccagaaagagtggcgatatttgccctggatcttggagttggtcaggctggcatggatcatatgcggcagcacgaatagggcgatcatcaacgctggcgcatagatgatgtaggcatgaagcagcaggaacgccagcggcgcagtcaggaagatcagccgtggaatgccgctcaagaagtggaacatggcgttgacgtaacatagccgctgagcaaacttcagccctttaccggtgagcgggttatcgagacggaagatttgtaccatcccgcgcgcccagcgaatacgctgaccgatatgcgcgctcagactttcggtcgccagccccgccgcctgcggaatacgcatatacgcggaggtatagccacgacggtgcaaccgcagagaagtatgcgcatcttcagtcacggtttcgacagcaatgccgccaatttcatccagcggcttacgacgaatcaccgcacaggaaccgcagaagaaagtggcgtcccacatatcgttgccatcctgcaccagaccatagaacagcgtgccttcgttcggcgttttacggaaacgccccaggttgcgttcaaacgggtccggactgaagaagtggtgcggcgtctgcatcatcgccagctgtttttctttcaggaaccagcccatggtcatttgcaagaagcttcgcgttggtacgtggtcgcagtcgaaaatgctcacgaactcgcctttggcatatttcagcgcattgttgatgttgcctgctttcgcatgttcatgagtggtgcgggcgatatatttcacccccacgttttgcgcaaactggcgaaactcttccctgccgccgtcatcaaggatccagatattcagcttatctttcggccagtcgatacccaggctggcgtaaatggtatttttcaccacgttgagatcttcgttgtaagtcgggacaaagatatccacgctcggccacaggctcatatctttcggcaatggcaccggctgacgattcagcggccatactacctggaagtagccgagcaccagcacaatccacgcgtacgtttcagcgaagagcagaataagcccgcacaccaggctgaccggatcgtcccagttcagcgtagaggtgtaacgccaccagatataacggcaagaaacggtcaggctcagcacaatcaacattagcgcgctgaagcgccccggcatccgccgtacgatcagcgctaccccccacagcagcatcaggaagataaactgcgccagcgggttaaacggctgagtaacgcagattaacgccagaatcaggctgaaggtgacgatgataccgaggatcaaccgccgcgccccggcactcaaatgaccgagctcttttttctcatccagatgctgtgttttatggctaacgcgctcaggcagctcgttcatccattgatggtaacgtccacgaatattttgcagaccactaaatgcccgcctgcgcggtttcggcgtttctttgcggcttgcaccgatcaataaccagcatgtttgaatgagataacggaccgggtccagcggacgcggacggctggcgttgatatgcggatacaggtttttatgttctgcgcgaatacgctgccagcgcgggtgctccagcggaataaaaatccaggccaggatcatccagaaacagccgagcgtcgcgctgaaagcgctcgcaccgtgacgacgataatcgcgataacgcccgataagccgcgcgttgaccggcgggataagcaaccaccgggtcaggatactcatgatgcactcccgactggcgtttacatcaacttgcactcccgactggcgttttcagcccggagtagttcaacaggcaccagttcgccagcgtcagtatctcttcagccgccagcgcatcactgcgatattcacctactggttgcttagccgccaggcattcagccatcgcttcatcacgatgaatgagcatcggcagtaatcggcgctggctttgcaaccaaagctggtaaatatcgtcctgaacctgactgccaatacggaagtcattaatcaaaatatgtgcgccatccggcagcgcttgctgatgcagtcggatatggcagttggcatccacattgacgattgccaggctgtgatcgcacaaactcagcagctggtgggttatctggctggcatcacgcggtaagtcgattaaaatccactggtaacgcccgctggcttttagttgctgtaagccggagcaaatatcgctcagccgggtttgccagtgctgtggattttcttgttcttcaatggataactgaccaaaaggcagcaaatcgagctggctggtgtagcgcaacccagcgtcacgccagtcctggccatccagcatcgctctggcccagccctgacggtgggtaaaatcaacattaaaactcaggcgcaacaagttgtccgggcaggcatcgaccaccaggacattttctcccaacatttgtaaactccaggctaatgcggcggtgatggttgttgtccccacgcctccccgcaccccctgctatcccagtacggccattcaccaatcccttacttttgttgcgcaaactctgccagcaacggccagcgttttaatgccgcggccaactgttcgcgttgggaaatatcggcataatcaatatcaggcagactaaatgcctgctttaacgccacaatatcattctggaagatatagcctatcgcgggatcaggcagagtatctggttcattgttattcattttgcttgatccctatgaaataaccgtaccgttcatgagacaattctaaccgtgagcatttcgccggtttattgtttacggcgagacgggaatttgctcactttttgactttccgttacgcaacagaaaaagttaaaaacgaaaagactaaaatcacacgtcttgtgaccttctaaattgattcacatgctaaatctgataagttttaatttcaatggtaggtttatttcttagctttcgctagtaaactgataatcagacaaaatggtgacatgagggacattgtggaccctgtattctctatcggtatcagtagtttatgggatgagctgcgacatatgccagcaggcggcgtctggtggtttaacgtcgatcgccatgaagatgctatcagtctggcgaatcaaacaattgcatcccaggctgaaaccgcacacgtcgcggtcattagcatggacagcgatccggcgaaaatctttcaattagatgattctcaagggccggaaaaaataaaattatttagtatgctaaatcatgaaaaaggtctatactatttgacccgtgatttgcagtgttctattgatccccataattacctttttattcttgtttgcgcaaataacgcatggcaaaacattcctgccgagcggcttcgcagttggttggataaaatgaataaatggagcaggttaaaccattgtagccttttggtaattaatcccggaaataataacgataaacaatttagtttgttgcttgaggaataccgtagtctttttggtcttgccagtttgcgttttcagggtgaccaacatttgctggatattgccttctggtgcaacgaaaaaggggtcagcgcccgtcagcagcttagcgttcagcaacaaaatggtatctggacattagttcaaagcgaagaggcggagatccaaccacgcagcgacgaaaaacgcattctgagtaatgttgctgtactggaaggtgcgccgccgctaagcgaacactggcaactgttcaacaataacgaagtcctgttcaatgaagcccgtaccgctcaggcggcgacggtggtcttttctttacagcaaaatgcgcaaatcgagccactggcccgcagcattcataccctgcgtcgccagcgcggtagtgcgatgaaaatcctcgtgcgggaaaataccgctagcctgcgcgccaccgatgaacgtttgttattggcctgcggtgcaaatatggttattccgtggaatgcgccactctcccgttgtctgacgatgatcgaaagcgtgcaagggcagaagtttagtcgctatgtgccggaagatatcactaccttgctgagtatgacccagccgctcaaactgcgtggtttccagaagtgggatgtgttctgtaatgccgtcaacaacatgatgaataaccctctattacctgcccacggtaaaggcgttctggttgccctacgtccggtaccgggtatccgcgttgaacaagccctgacgctgtgtcgccctaaccgtaccggcgatatcatgaccattggcggtaatcggctggtgctgtttctcagtttctgtcggattaacgatctggataccgcgttgaatcatattttcccattgcctactggcgacattttcagtaaccgtatggtctggtttgaagatgatcaaatcagtgccgagctggtgcagatgcgcttgcttgccccagaacaatggggcatgccgctgcctttaacgcaaagttctaaaccggtcatcaatgccgagcacgatggtcgccactggcgacgaataccagaacccatgcgactgttagatgatgctgtggagcgcagtagttgatataagatgctgtggagcgctcatcatgatgaccatcagcgatatcattgaaattattgtcgtttgcgcactgatatttttcccgctgggctatctggcgcggcactctttgcgacgcattcgcgacaccttacgtttgttctttgctaaacctcgttatgttaaaccggccgggacgttacgccgcacggaaaaagccagggcaaccaaaaaatgactcaatttacgcaaaataccgccatgccttcttccctctggcaatactggcgcggcctttccggctggaacttctattttctggttaagttcggcctgttgtgggcgggatatcttaacttccatccgctcctcaatttggtgtttgccgcgtttctgctgatgccccttccgcgctacagcctgcatcgcttgcgccactggattgccctgccgatcggctttgctttgttctggcatgacacctggttgcctggcccggaaagcataatgagccagggtagccaggtggcggggttcagtaccgattatttaatcgaccttgtcacacgctttattaactggcagatgattggggccatttttgttttattagtggcctggttattcctgagtcaatggattcgcattaccgtttttgtggttgccatactgctatggctgaacgtacttaccctggcgggaccaagtttctccttgtggccagccggacaaccgacgaccactgtaacaacgacgggtggtaacgcagcggcaaccgttgcggcgacgggtggcgcaccggtagtgggtgatatgcccgcacaaactgcaccgccaacaacggcgaaccttaacgcctggctgaataatttctataacgcggaggcgaaacgtaaaagcaccttcccgtctagcctgcccgctgatgctcagccatttgaactactggtgattaacatctgtagcctttcctggagcgatatagaagccgccgggttgatgagccatccactgtggagccatttcgatattgagttcaagaactttaactccgccacctcctacagtggcccggcggcgatccgtttactgcgcgccagctgcgggcagactagccacactaatctgtatcaaccggcaaataacgactgctatctgtttgataaccttagcaaactgggctttacccagcacctgatgatgggacataacggccagttcggcggttttttgaaagaagttcgcgaaaatggcggcatgcagagcgaattgatggatcaaacaaatctgccggttattttgctgggctttgatggtagcccggtttatgacgataccgctgtgcttaaccgctggctggacgttaccgaaaaagataaaaacagccgtagtgccacgttctacaacacgcttccactgcatgacggcaaccattatccgggggtcagcaaaacagcggattacaaagcgcgggcgcagaaattctttgatgaactggacgccttctttactgaacttgagaaaagcggtcgtaaagtgatggtggtcgtggtgccggaacacggcggcgcgctgaagggcgacagaatgcaggtatctggcctacgtgatatccctagcccgtctatcaccgacgtccccgttggggtgaaattcttcggcatgaaggcaccgcatcagggggcaccgattgtcatcgaacaaccgagcagcttcctggctatctccgatctggtggttcgcgttctcgatggcaagattttcaccgaagacaatgttgactggaaaaaactcaccagtgggttgccacaaacagcaccggtctccgagaacagtaatgcagtagttattcaataccaggataaaccgtacgttcgcctgaacggcggcgactgggtgccttacccgcagtaagaacgaaaaaggccgcagagtttcccccctgcggcctggtccgggcgcaaattgccattacggcagcctgacgcccgcatgacacgttacttccgcttgttcagccagttcacgatcatactggcaagaatgccagcaatgaccggagccgctaaatcatgccagaaggccatgcccagctctgcgaacgtcatatagccgcctgtgttgtaatgacaacgtttcgcggctattcttgagtggtctagagtcaagattagcccccgtggtgttgtcaggtgcatacctgcaacgtgcgggggttttctctctccagcaaccaatgccaccagggataaagcccccgcaacattgcgcctcaccggaacctttccggcttgccgctgattctacgattgctttttactgtcagcacccggcaatcttcctcattgcgcgatgccttccagcttaatttctttatttgcaatagttgcagttcatatccgggctgactccagactggtagtgaaatgcgcaattttgtagaattgcgcctcctcgcgacctccccagtgaatctgttgcctcattttttacatactgcgtattcgacttctccacctgttgcgcaagagaaactgggtttattcatttttgcgaggccgacttctttctggacaggactttatgcagcacaacacactaagcaaacacaatcagaaattgccgtttacacgctacgacttcggctgggttttattatgcataggcatggcgattggtgccggaaccgtgctgatgccagtacaaattggcttgaagggaatttgggtatttattaccgcagcgatcattgcttatcctgccacctgggtagtgcaggacatttatttaaaaaccctttctgaaagcgattcctgtaatgactacaccgatattatcagtcattacctggggaagaactggggaattttcctcggggttatctactttttgatgattatccacgggatttttatctactctctctccgtggttttcgacagcgccagctacctgaaaaccttcggtttaaccgatgccgatcttagtcaatctctactttataaagtcgctattttcgccgtactggtggcgattgcgtctggtggtgaacgattactgtttaagatttccgggccaatggtggtggtcaaagtagggattattgtcgtgttcggttttgcgatgatcccgcactggaatttcgccaatataaccgccttcccgcaagcctccgtctttttccgcgatgtcttgcttaccattccattttgcttcttttctgcagtatttattcaggtacttaacccaatgaatattgcctatcgtaaacgggaagcggataaagtactggcaacccggctcgcgctgcgtacccaccgaattagttatatcacgctcatcgcggtgatcctgttttttgcctttagctttaccttcagtattagccacgaagaagccgtttctgcctttgaacaaaatatcagtgcactggcgctggccgcgcaggtgatccctgggcatatcattcatatcacctctacggtgcttaatatctttgccgtactgaccgcattctttggcatttatctcggtttccacgaggccattaaaggcattattctcaatctgttaagccgaattattgataccaagaaaattaacagtcgcgtgctgactctggcgatctgcgcttttatcgtcattacgttgacgatttgggttagctttcgtgtaagcgtgctggtgttctttcagttgggaagcccgttatatggtattgtgagctgcctcattccgtttttcctgatctataaagtcgcacaactggaaaaacttcgcggatttaaagcctggctgattctgctgtacggcattttgctatgcttgagcccactgttgaagctgattgagtaaaccggagcgcatggccccggttttgtgagttaacgctgcggattttcatcctgatcaacagcaaaacaagctaccagttgaccgccgtagtcttttagctgcggctgcaactgggtgcaggggccgaagcgccgacgacagcgggcgttgaaggcgcaacccggcggtggattcagtgggcttggtagttcaccgctgagcttgatgcgctcgcggcgatcgtccgggttcaggcgcggcgtcgcggaaagtagcgcctgagtgtacggatggcgcgggttattgaagatttggtctttcgttcccttctccacgcagcggcccaggtacatcaccatcacttcatcagcaatgtgctccaccacgctcaggtcgtgggagataaagacataagacagccccaactcctgctgcaaatccatcatcagattcagcacctgcgcgcgcacactaacatccagcgcggaaaccggttcatcggcaatcaccacatccgggtcgagcatcagaccacgggcgatggcgatacgctgacgctgaccgccggagaacatatgcggatagcggtcatagtgctcggttttcaggccgactttcgccatcatgctcagggctttttcccgacgctgttctttgcttaagctggtgttgatcagcagcggctcttcaagaatttgcccgacttttttacgcggattcaggctaccgtaagggttctggaagacgatctggattttctgccgacgcagcttctgcgcctgcggatcgtgcttaagcagatcctgcccctggtaatacagctcgccaccggtgggcatttcaatcatcgtcagcaaccgaccgagggtgcttttaccgcagccagattcgcccactactgccagcgttttgccacgttcaaggttaaagctaacgccatccagcgctttaaccagacgttccggcgcgaacatgcctttcttcaccggataatgttttttcaggtcgatagcctgcaacagcggttgttgcagggtggcctcttgcgtactcatagtgtcggcctcccggcatcatcaagtgggtaatggcatttggactgacgcccgtcagcgagcatattcagcgccggttcttcagcgcgacatctgtcagtggcataggggcagcgcgggttaagcaggcagccgttcgggcggtcgtacttgccgggaacgacacctggcaagctcgccagacgttctttgtcctgagcaaattctggcagcgcacgcagcaatgcctgagtatacgggtgacgcggcgcatggaagatggcgtgcgcatcaccggtttccaccacctggcctgcatacatcacgatgattttatgtgccgcttccgccaccagcgccaggtcatgggtaattaacaccagcgccatgttctctttctgctgtagctccagcagtagttcgatgatttgcgcctgaatggtcacgtccagcgcggtggtcggttcatcggcaatcagcagttttggccgacaggcaatcgccatggcgatcatcacgcgctggctcatgccgccggaaagctgatgcgggtaaacatccagacggcttgccggatcgggaataccgacctgattcagcaggtcaatcgctcgctgacggcgggtacttttgttgccgccctgatgcaccttaatcgcttccataatctggaaacccacggtgtagcacgggttaaggctggtcatcgggtcctggaagatcatcgccacttcggcacccaccaggttgcggcgctctttttcactgatacgctgcaaatcctggccgttaaactccagtttttctgccattacgcggcccggataatcaatcagccccataatcgccagactactgacgctcttaccggagccggactcacccacaatcccgaccacttcgccctgttttacgctgtagctgatgcggtctacggcgcggaacggcgcgctttcgtcgccgaaatgcacgcttaatttatctacatttaataacgccatctcgaacctcttactgcttcagtttgggatcgagcgcgtcacgcagaccgtcacccatcaggttaaatgccagcaccgtcagcaggatcgccagacccgggaaggtcacgacccaccaggcgctttgcgcgaactgcaacacgtcggagagcatggtgccccactcaggcgttggcggctgtgcccccatgccgaggaaaccaagagcagccatatcgagaatggcgttagagaaaccgaggctcgcctgaacaatcagcggcgcaaggcagttcgggaagatgttaataaacatctgacgcatcgccccggcacccgccacgcgagacgcggtgacgtaatcgcggttaacttccaccagcacggcggcgcgggttaagcgcacatagtgcggcaaggcaacgaaggtcagtgccagcgcggcgttaccaatgctcgggccgaaaattgccaccagcaccagcgccagcagcagacttggcagcgccagcatgatatcgaccacgcgcataatgatgttatcgaccaggccgccaaagtaaccggcgatcaggccgagaataacgcccataatcaggcttaacacaactaccagacagccaaccagcaggctcaggcgcgcaccgtacatcaggcggctcagcacatcacggcctacgtcatcggtgcccagcaagtgcgccatgctgccgccttcctgccaggctggcggggcgagcagtgcatcgcggaactgttccgccgggttatagggtgcaatccagttggcaaagatcgcgatgaacagcacgatgacgacgtaaaccagcccgacgaccgcgcctttgttgcgtttaaaatagtgccagaactcctgtaacggggtcatcggcaccggtgcgctaatcactttattttcagtaacctgactcatgatgtccccttacttcttatgacgaatacgcgggttcaccacgccgtacagcagatcgaccagcaagttgacgaggataatcatcgtcgccaccagcaatacgccgccctgcactaccggatagtcgcggcgttgcagtgcgtcaatcaaccagcgtcccagaccgggccagctgaagatggtttcggtcagaatcgcccccgccagcaatgttcccacctgcaggccgataacggtcaccaccggcagcatcgcgttacgcagcgcatggacgataatcacccgcatgcgggttagccctttggcgcgcgcggtgcggatgtaatcctcgcccagcacttccagcatgctggagcgtgtcatacgcacaatgaccgccagcggaatagtacccagcacaatggcaggcaagatcatatgggcgacggcatcgataaagttgccgtcttcaccccagatggcggtgtcgattagcataaaaccggttaacggattggagtcatcgaggaacaccatatcgctcacgcgaccggagacgggcgtcaggttccagtgcacgctaaccagcatgatcagcatcatgccccaccagaagataggcatactataacctgtcagcgccaggccaaccgctgtgtgatcgaaaatggaaccgcgtttaaccgcagccagcacgccgaccggaataccgactgccgtagcaaaaatcatcgcgcagacgccaagttccagcgtggcctggaagcgcggcacgaactcttcccaaaccgggatgcggcttttcatactaatgcctagatcgccatgcataacgccccaaatgtaatggagatactgctgccacatcggtttatctaagccgagttcagccagcagctgcgcgtgacgctctggggagatcccacgttcgcccgccatgatcatcaccggatcgcccgggatcatgtggacaaaggcaaatgtgagaagggtaataccgataaacgtggggatgacgagtcccaaacgtcggagaataaactgcaacataacccggattctctatagtgacccgcagcctggaactgcgtgtctgtattgctcacaaatcaattcccgcccttatcggacagggaatgaagtattgctgccggatggcgctgcacgcagaggcacagcgccaccgggtatacagattgttgacaaagtgcgctttgtttatgccggatgcggcgttaacgccttatccggcctacaaaatcgtgcaaattcaatacattgcagaattttcgtaggcctgataagcggagcgcatcaggcatttttgcctttgccatcagtcttgtatggcttttaattattcgatagagacgttttcgaagtgatgtttgcctaatggatcaaccacatagcctttaacttctttacgtaccggttcaaacacggtggagtgagcgatgatcagtgccggagcctgatcgtgcatcaccacctgcgcttgtttgtacagttcaacgcgtttattgtggtcgtcggtagcacgcgccggttgaatcagatcttcaaacggtttgtagcaccatttactgtagttggagccttgttcagaggcggcgcagctgaacagggtggcgaagaagttatccggatccccgttatcgccagtccagcccatcattaccgtctggtgctcgccatctttcgcacgcttgaggtactcaccccattcgtaggtgacaattttggcctgcacgccgactttcgcccagtctgcctgaatcatctccgccatgcggcgagcgttcgggttatacggacgttgtaccggcatcgcccacaggtcgatggagaaacctttttccagacccgcttctttcagcaaggctttcgctttttcaggatcgtaggtgtagtcctgaacgtcgtcgttatagccccacatggttggcgggatcaggtttttcgcacttacgcccgcgccctgataaaccgctttgatgatcgcgtctttgttcaccgcgtaggtcagagcctggcgaactttcacgtcatcgagtggttttttctgcacgttatagctgagataaccgacgttcagccccggcatttccatcagattgatggatttatcctgcttcatgcgagcgatatctgccgggttcgggtacggcatcacctggcattcattcttctgcaatttcgcgtaacgcacggaagcgtcaggggtaatagagaaaaccagcgtatcgatctgcggtttggtgccccagtagccatcaaacgctttgtagcggatacgggaatctttttgatactgctgtaactggaacggaccggttccgattgggttgaggtccagtttttccggtgtaccggctttcatcatcgcatcagcatattctttactcagaatagaggcgaagtccattgccaggtcagcgaggaacggcgcttccgggcgagtcagcacaaactgaacggtgttgtcgtccacctttttcacttcactgatcagctctggcaagcccatgccttcgaagtattcgtagctgccgccagaaactttatggtacgggttttgcgcgtttttctgacgatcgaagctgaacaccacatcatcggcgttcagttcacgcgtcggtttgaattctttattgtcgtgccacttcacacctttacgcagatggaaggtataggttttaccgtcttcgctgacttcccacttttcagcgaggcccgggatcacttcggtggtgccgattttaaattcaaccagacggttataaagcgggacggaagaggcgtcataggtggtgccggaggtaaacagctgcgggttaaacccttccggagatccttcactgcaataaaccagagttttagcctgaacacttgctgcgacggtcatagccaccaggctgagaccaagcttcagcatcccactctttttcaaggaaatacgcattattctgctccaattgtgatgtttgttgttttaaccctttgcagtgggttgtcgctgcctgaccttttttgttttttgcccggtcgggtcaacgttatgaggtggggatgccgtactaattaacatcagtgtaacagtgcggatcctccataaaatgcccctcgtgacctacaatctgtcaacagaatgtgaaaacgtcaatacagccaaccgggatttacaccaacggtgagaatccacacacaaagattaaaaaaacttcaaacagctatttgcagcagagaaatttgtgctactccaacatgaccagaacaatcagcttaatatttagcaacatttggtgattaagttttatgcatttaatgaaaaaaatctgaggaaaaggtggatatctgagcgattaataccatgaacgctaaaacgcacagcggaaaatgccagggccagccataagtaacgcaaaaaaagatttaagcaaatataaaaaaagacaatggtttctgtcacaaatccgttaatggatagtgagatatggggcgcaaatttggcagggaaatgtgtgtcgtgtaggtcgaataaggcggtcgcgccgcatccgacaatggccggcacatttgcctgatgcgacgctgacgcgtcttatcaggcctacgtcgagtcgaacctccctgcccccggaggttctcatcctcatgagctgcagatgcaaaaaagcctgctcgttgagcaggcttttcgaatttggtcggtgatagaggattactcgccacttcgtggctcgccctgcgggccgttgctggcgcaacgttctctcgcttcgctcgagtcgaacctccctgcccccggaggttctcatcctcatgagctgcagatgcaaaaaagcctgctcgttgagcaggcttttcgaatttggtcggtgatagaggattcgaacctccgaccccttcgtcccgaacgaagtgcgctaccaggctgcgccaatcaccgaatgcggggcgcatcttactgcgcagatacgccctcgtcaatcccttaatagcaaaatgccttttgatcggcgagaaagtcagcaggccgcttagttagccgctgcctcttttgcctgcgggatgtgacaccagttgttgttttcgttaattccaccatccggactagtatagccaagacaacccatgatggtatcgtacagctctacgtgacggcgtggcactttcatgtcggcttcttttttcagctgcgcaaacgcctgcgcattggccggattttccagatatttatcactcatccagaccatcatcggtacgcggaactgctccggcggtgccagttcacgcggcgtgccgtgcaggtgctcgcgttcattaatactctcaccgtggtcagctgcgtagaacacaatcgctttcttatcgcgaacctgatcaatcacgctggagataaagtgatccacataggtcacgctgttgtcataggagttgatcatctgcgctttggtacagccgctatcaacaccaatacattccggcttccactgcgcgaagctacgcggataacgctgggtgtagttaaaatggctacctttggtatgcagaatgatcagatgcttaccatccgggttgcgccctaggctttgctgcatttcgtctaccagcaacatatcatctaccggcttgccacgattacgtggctccgcaccaatctgctcacgataagcaatgttgtccgccatcgtgttgctgtagaaccacatttcgctctgcatagcgtagaggtcagaactgaatcctaactgcttcagaaccgcgaaaatgttctgttcttttaatgtgcgctgcggattatcttccgcgcccccctgacgtacaaacatgcaacgcagactgagtttggttgcggtatcacaggagtaaccacggaacgccgccagatttttctcctgggccagtttcggcgtggtattacgctcatagccgaaaatacccatatggtcccaacgcgtggtttcaccgatgataaacacgacataagtgtcatcaacgttttgcggtgcctgataagtgaatttcttcgccggattaagcaaactattattatcggaagattcatcgacccgcgcccaggcatacagccccaacgcagaaagccagttacttggcagataagagttcgctacgacaccgccataactcggcaaatcaacgccggtcgccctctccactttcttctgctggatatccagcaaacgaatcggtgcccaaaccataatacccgccagtacgacgaccgccaggctgcgaatacgctgccctggggttcgcagttgtcggagcaaggtgtagcgacagcggttattccagataaggataagaggcaatgcactaacggcgattaaccagagaataaagttcagaccaacaacttctttactcaggtcgatatcggtggtcatgacggaagcgatgatgccataaccaatgaccacattaaggaaggtcatgtaatagctggcacctgcggaaaagagcaccaccaggcttgccagaatacgccagctgcggcggccaaacaggctaagaagacgtagtaaaaagaaggtcaccagtacggtggcggccagttcaacaacagcagaaatgcctttccagacggtaaaatcgtgcgcatagctgccgaagcggcggtaaaaaaccgcgccattcataaaaaggccaatatagattgcaagcaaaaagctcagcttctgctgtgtaatgcttttgatgtatctcatgcaaacaaaccctggacaaacaggtgataacaccctgcttagtggcttttcaggcccggcagggaaaaagtgcggaggtagtcagataagtaaaatctacacgcgcgaataagtagaccacagcaaagggaaaaagtgtggggaaagagtgtgcatgaagcacaaatttacaaaaatgcaagtttgaaaagagactttagcgttacaaaaagcagtaaaaagggccagttaattggcccaaattttacgagtcattgtttatacatttcgttgatgcgtttgatgcacacggaagctgaagcccagtagctcgcggctgagcattaaagggagccatgcgcctcacgcaacattttctgctctggctgacgaatcgtcgtagaaagcgccaaactcagaatcagcagggcgaaaatcacgtagaaggtcacatagaagccgccaaacagactggcgataatgctaccacaaatgctaccgataccgaaaccgagataaatcacaccgtagtttttcgccaggttattgaggccaaagaactcactgaccagactcggaaagacggtaatagtgccgccaaagttaaatgccacgcaggcaatcgctgcaaagaacgtcactgcattcaatggtgcaaacagcagggccgccatacccaccaggcttatcacctgaccaatggtaataacacggatacgggcgattttgtcagacagaatacccagcaccagacgaccactaaggttggcgatggaaataacagtgactgcattggctgcggaaaccacatcaaggtgtgccagactttgggcgatatctttcgctaccccaatcacgtacaggccgctcatgcaggcggtcaggaacattaccgctaacatccagtactgcggtttacgcatgctctctgccagcgtgtaatctttctccaccacaccattgctggttttcacttcctgttttggtgcgtctttcattaacgttgcgccgaaaacaatcatcaacagcgcaatcgctccccaaatcacaaaggttttttccagaccgaccgtttccagcagctgcgtgtcgataaatttgaaacccaggctacccagaccataagaaccgatagcgaacgcggagatcagacctttacgctccgggaaccacttcacacagttagagagcgtcagcagataacccgcgccatctgccagtcccaccagcacaccggcgcttaaccacagcatcatcaggttgtcagaatgcgctgtcaggaagaagcctaatcccagcaaaatgccggaagccatggtgacgcgtttaacgccaaaacgttcctgtaatttgcccgcaacagaagagctaattgccagccccagacttaacaagccgaaagagaaagcgacctggcttaccggcgcatccagcttggcggaaagcgcgccattaaacaggctccaggtataaacgctccccagcgcaaactgggtaatgatagtaccgatgagtgtcagccagcgggtacgctgataattactaggtgtcatggcagtattcctgcagtaataaaaaggaaaaatctctgccgacaaccataacgaagtgcactttatgcctggggaaaaacggcatgaaatgccatcagaacggaatgaaatgccttagttcaggaatgaatgacgcgacaattattcaccaaatttattatttggtaagttagcacccactatcgccacaactattgttatttaatggtttcaattgtgactgttacgttaaaatctggcgctaacccccatcgtatacagatagtcgctattattagtggtattttctgcctgagttagcgcggcataggcggcaatattttgattgagcaacatatcagcgcctacggtgacatccagccagttgccgttctggtttgtcgccgtcatccggctcaggccactttgcgccttccagatattctcgccaaattgctggttatagctgatttgcgcccagggtcggagatcgccaagccgggagtcaacacgccagcctaaggtactcacgctggcatgccataacggatcggtcagcgtggtagtactgtcgccaaactcgttatacatgctggtggttgtgccatcgtaatgtaatgccgcgaccgggccggttgtaacctgttcatataaaggaaaattccagcccatactcatactgctggtcacatccacaggggtttcttccgccagattgacttccagtcccagcgccctttggctactttgaatacgttggctcaaaatatcgttgtaatcaggttgatgatcactatcccaggtgtaacgctctgtggaaagtccgggttgcgtatcaacgatatattcttgttgccaggcgtaagctgtgttgagaaaaaaggcactgattaccacgctcgccagcaggcttagctgccagcgaccaccgcttttttttatgatcattaacacgactccagggaagagccgaattcggcaatattattgtcattgtatgaaggatatcgggcatagtagccctgtattaaatattgactttttcaccgatgcgtcaagaaaagcggctgaaatttttacgatcgggtacatagcgagggaaagtatggaacgttgcggctgggtgagtcaggacccgctttatattgcctaccatgataatgagtggggcgtgcctgaaactgacagtaaaaaactgttcgaaatgatctgccttgaagggcagcaggctggattaagctggatcaccgtcctcaaaaaacgcgaaaactatcgcgcctgctttcatcagttcgatccggtgaaggtcgcagcaatgcaggaagaggatgtcgaaagactggtacaggacgccgggattatccgccatcgagggaaaattcaggcaattattggtaatgcgcgggcgtacctgcaaatggaacagaacggcgaaccgtttgtcgactttgtctggagctttgtaaatcatcagccacaggtgacacaagccacaacgttgagcgaaattcccacatctacgtccgcctccgacgccctatctaaggcactgaaaaaacgtggttttaagtttgtcggcaccacaatctgttactcctttatgcaggcatgtgggctggtgaatgatcatgtggttggctgctgttgctatccgggaaataaaccatgattcgggaagcgcaacgtagtgaactccccgcgatcctcgaactgtggctggaaagtacaacctgggggcatccctttataaaagcgaattactggcgtgactgcattccgctggtgcgggatgcctatcttgccaacgcgcaaaactgggtctgggaagaagacggtaagcttctcggttttgtcagcattatggaaggccgatttctggcagcgatgtttgtcgcaccgaaggccgtcaggcgcggtattggtaaggcgctgatgcagtatgtgcagcagcgccatccccacctgatgctggaggtttatcaaaaaaatcaaccggcgataaatttttaccaggcacagggttttcacattgtcgattgcgcatggcaggatgaaacccaactacccacatggattatgagctggccggtggttcaaacgctgtaattaactgctggccggtggttcaaacgctgtaagtgtcagttccggaccgttgtatttttccagccatgccagcgccgtattacccgcacagccattccccagccggctgctggggagatctttggtcagcacgttcactgcgccgtttttacaaataccgtcagcggttaaatccagatccggccatgccccttcgtgaatgcaaatcacgccaggtttaattccctcgctaatgaccgctccggcaagaatttgcccgcgtgcgttccacaaccgaacagtatcgccatcttgtatgccgcgctcctgggcatcgtcaggatgaatggtgacaggctcacgatttgccaccgcgtacaattcgcgcagagaactgtaattcagctggctgtgcaggcggtgcgccggatgggcagaaagtacctgcaactgttctggttcggcattgccctgccattcgtccggctccagccacattggatgcccagggcaatccgggtaaccgtaatcggcaatacgctgactgaagatttcaatcttgccgctggcggtttttaacggatgcgccagcggatcgcggcaaaaatcagcgaagcgaataaaccgctcgctgtccgggttttccggcatctcaattaactggttggcttgccagaactcagcaaatggcggcaattcaacctgctggcttgccccgcgctgtcgggcaacgttataaaacgtttccagccattgcagctcactttttccttccgtaaaacgtgcataaccgcccttctcccagcgttcacttaactcggcaaaaacatcaaaatcattacgcgcttcatagcgtggcggcaccacttgcttcatcggcaccagatgctgattactgtaatcaccggtcatggtgagatcattacgctcaaaagaggtagtcgcaggcagaacgatatccgcgtgttttgccgccgccgtccagaagcattcagagatcaccaccagctccggtttttgccaggcacggatcaggcgattggtatcctgatgatgagtaaagttggcaccgcccgcccaccagataaaacgaatatccgggaaatgtcggttcataccgttgtgttgatatgcgccaccagggttttccagtgcttcaacaatgcgggcaacagggattttatccaccgcatcgcagccacccggcaagctgccctgcatggaagagagcaccgcagaacgccgcgtggggttaccaccattggcaaaatggtaagaaagaccaaaaccgccgccgggtgtgccgatttgccccaacattgctgccagcgtgacgatcatccagtgtttttgctcaccaaactgttggcgctgcattccccagcctgccatcagcatggtggtattttggtggaaaatagccgccagctcgcggattttcgctgcgccaacaccacaaatctctgctgcccattcggcggttttcgctattccgtcactctcgcccagcaaataagaggcgaagacggcataacctgtggtgcaacgcgccagaaacgcttcgtcgtgccaaccattttccaccagcgtatgggcgatccccagcatcagcgcaacatcggtgcccatgtgcggtgccacccactccattttatcgccaaagaaatcgacggtttcgcttcgcattggatcaatgcagatcagctttttcccgctgtcacgcagtgcagaaaagtaagaaagcccctgctcatcggatgcattccacgcaattttcagcgtattgagtgggttagcactccacagcaccacgacatcgctatgttccagcaccagcggccaactggtctgctgttgataaacttcactaccacccacgacatacggcatgatcgcctgtgccgcgccggtgctataatcccccagatgcccggtataaccgcctgccagcgccatatagcgttgtaataatgtgctggccttatgcagcacgccgttactacgccagccgtaggaaccagcaaaaatgcttgccggaccataagcctcacgaatgcgtttatgttgttggtgaataagatccagcgcctcatcccaactcacgcgaacaaattcatcctgcccacgaatgccttgcgggttttccggactcgcaagaaagccttttcgcaccattggaaatcgtacccgcgtattgctgtgaacctggtcgcgaaccgcgctctgcaaggagttttccattcctgtggctaacgcgccacggctgctaaacacggtttcgccgtcggtttcaaccagcatgggcccccaatgggcggcagtcagaacggaatatcgtgaggatgagttggccaaaccgaagactcctgaaaggttagatgtattgagcagttaaatattacttacaaatttccgagtattcccaggaataatcttcatgttcacgcggcataatctcccgccacggaacccgtggcaaagaataaaaaggttattaaggattaacaatgaagaaacgtgtttatcttattgccgccgtagtgagtggcgctctggcggtatctggctgcacaactaacccttacaccggcgaacgcgaagcaggtaaatctgctatcggcgcaggtctgggctctctcgtgggcgcgggtattggtgcgctctcttctagcaagaaagatcgcggtaaaggcgcgctgattggcgcagcagcaggcgcagctctgggcggcggcgttggttattacatggatgtgcaggaagcgaagctgcgcgacaaaatgcgcggcactggtgttagcgtaacccgcagcggggataacattatcctcaatatgccgaacaatgtgaccttcgacagcagcagcgcgaccctgaaaccggcgggcgctaacaccctgaccggcgtggcaatggtactgaaagagtatccgaaaacggcggttaacgtgattggttataccgacagcacgggtggtcacgacctgaacatgcgtctctcccagcaacgtgcggattccgttgccagcgcgttgatcacccagggcgtggacgccagccgcatccgtactcagggccttggcccggctaacccaatcgccagcaacagcaccgcagaaggtaaggcgcaaaaccgccgtgtagaaattaccttaagcccgctgtaatccctttcatgccaggtgatgcagaaatcacctggcattcttcagttttccttcatcatatttcaggctaaggtgatcgccttatcagtgaatggagagaagcatgaagccgtccgttatcctctacaaagccttacctgatgatttactgcaacgcctgcaagagcatttcaccgttcaccaggtggcaaacctcagcccacaaaccgtcgaacaaaatgcagcaatttttgccgaagctgaaggtttactgggtagtaacgagaatgtaaatgccgcattgctggaaaaaatgccgaaactgcgtgccacaagtacgatctccgtcggctatgacaattttgatgtcgatgcgcttaccgcccgaaaaattctgctgatgcacacgccaaccgtattaacagaaaccgtcgccgatacgctgatggcgctggtgttgtctaccgctcgtcgggttgtggaggtagcagaacgggtaaaagcaggcgaatggaccgcgagcataggcccggactggtacggcactgacgttcaccataaaacactgggcattgtcgggatgggacggatcggcatggcgctggcacaacgtgcgcactttggcttcaacatgcccatcctctataacgcgcgccgccaccataaagaagcagaagaacgcttcaacgcccgctactgcgatttggatactctgttacaagagagtgatttcgtttgcctgatcctgccgttaactgatgagacgcatcatctgtttggcgcagaacaattcgccaaaatgaaatcctccgccattttcattaatgccggacgtggcccggtggttgacgaaaatgcactgatcgcagcattgcagaaaggcgaaattcacgctgccgggctggatgtcttcgaacaagagccactgtccgtagatagcccgttgctcagtatggccaacgtcgtcgcagtaccgcatattggatctgccacccatgagacgcgttatggcatggccgcctgtgccgtggataatttgattgatgcgttacaaggaaaggttgagaagaactgtgtgaatccgcacgtcgcggactaagccgcgactgcgtagagtaaagcccgataatcgctcgggcttttactctttattgggttgcagtaactgctgtagtccaggcctgattaaacgcctgatgctgtgccggtaatggcgcaatcagtttgttatattcacttgcctgctgactagtcgggaactggatgccatttgcgacaaagctcacctgagtaccttgctgagcaatgtagtctccaaccatcaccagttgttgcgtgaaagtttgtgccgccggaatcaacggttgcaatgcatcagctggcgtcgttaccactttggtgaatgcctgatcaaagaccggtttcaaatcatcgctctgttttagcgcagagtgcgcagcatcggcctgcaacttcgcattttgcagttgttgcgccagcacacccaggctaccgttcatttcacgcagcggaccgctttgcgtaacgtaatcctgcggtacgcgaattgcgttaacgctgtctacaaccgggcgcagaccggaatccatcgcctgattcacctgctgagaataaccatacagaatcgcgtaatcagagacaaaaggaccaaactgttttttctgatcggcagtcagggttggtagacgttcaccgctacgcatcactgtattctgcaggaagtcgataaacgctttacgctgatcgccttctttatcaaaacacccactcaggctaactaccattaataacgccgcaagaggcgcaaaccagcgagagcaggactttcctgtcgccattttcttactcctttcacccaaaaaaagcgcacaacgacacacgcgtgtctgacgtgacaaggatagtccaggacaggcttgcaggataccctttctacgtaatcttcctggtaaaatcatggagaaaatgaaacaaggttaatttgttgtttcattgttaaaaaatgatagtgccgttgccttttttgtagccagagatttacgccttcgcagaaggttagattttcgaaatctttacaaaacaggagtggtaagagatatatcggcatttatcagatcgttaggtggctataagtcacgctaaatgacaggctgaatcgaatcatagccagagcatgccctgacttcaccccgctgtgtctgcttttcccgactattcttaatgagcttcgatgcaattcacgatcccgcagtgtgatttgaggagttttcaatggaatataaagatccaatgcatgagctgttgagcagcctggaacagattgtttttaaagatgaaacgcagaaaattaccctgacgcacagaacaacgtcctgtaccgaaattgagcagttacgaaaagggacaggattaaaaatcgatgatttcgcccgggttttgggcgtaagtgtcgccatggtaaaggaatgggaatccagacgcgtgaagcctagtagtgccgaactaaaattgatgcgtttgattcaagccaacccggcattaagtaagcagttgatggaataaacttttatccactttattgctgtttacggtcctgatgacaggaccgttttccaaccgattaatcataaatatgaaaaataattgttgcatcacccgccaatgcgtggcttaatgcacatcaacggtttgacgtacagaccattaaagcagtgtagtaaggcaagtcccttcaagagttatcgttgatacccctcgtagtgcacattcctttaacgcttcaaaatctgtaaagcacgccatatcgccgaaaggcacacttaattattaaaggtaatacactatgtccggtaaaatgactggtatcgtaaaatggttcaacgctgacaaaggcttcggcttcatcactcctgacgatggctctaaagatgtgttcgtacacttctctgctatccagaacgatggttacaaatctctggacgaaggtcagaaagtgtccttcaccatcgaaagcggcgctaaaggcccggcagctggtaacgtaaccagcctgtaatctctgcttaaaagcacagaatctaagatccctgccatttggcggggatttttttatttgttttcaggaaataaataatcgatcgcgtaataaaatctattattatttttgtgaagaataaatttgggtgcaatgagaatgcgcaacgccgtaagtaaggcgggaataatttcccgccgaagactcttactctttcaatttgcaggctaaaaacgccgccagctcataactctcctgtttaatatgcaattcacacagtgaatctcttatcatccaggtgaaaaataaaagcgtgaaacaaatcactattaaagaaagtaatctatatttctgcgcattcccagcctcctgtgttgatttccaacgagtataactttgatttatagtcaggtggggcttttctctgtctgcctttcggtgaatacctgagacaaacagtctcaagcacccgtggctattctagcttaataagtttgtttcttctccttgatataatcctaaaaaaatctcataaaattaatatatgagataatctttattcagcagaagattattaaaggttgctgtattatttagcgataaaaaaagcctgccagatggcaggctatttaataacggcgttattattgcaacaggctaatatccgcaacgcgcaggaacagttcgcgcagtttctccagcatggtcagacggttgatacgcaattctttgtcatcaaccatgaccatcactttatcgaagaaagcatcaaccggttcacgcagctcagccagttcgaccagcgcatcctggtaacgaccttccgtaaagtacggctccagcttgtcacgtagcaccacaacctgcatcgccagtttaatttcttccggctctttcagggtagaggcattcacgcggtcgctcagcacttcgtcagatttcgccagaatgttagatacacgtttgttcgccgccgccagtgcagcagctgcatccagggtacggaaatggcttaccgctttcatacgggcatcgaaatcagccggacgagtcggacgacgcgccagtaccgcctggatggtgtcaacggtataaccttcgtcctgataccaggcgcggaagcgaccgagcataaagtcgataacatcatcaactacgttggcattagtcagcttatcgccatacagacgcaccgcttcttcggtcagcgtttgcagatcaaggttgaggttcttctcaacgataattcgcagcacgccaagcgcggcacgacgcagcgcaaacgggtctttgtcgcctttcggatgctgaccgataccgaagatacccgccagggtatccatcttgtcagcaatcgccagcgcacaagctactgggttggacggcaggtcatcaccagcaaaacgcggctgatactgctcattcagcgccaccgcgacatcttccgcttcgccatcgtgacgcgcatagtgcatccccataacgccctgggtgtcggtgaactcgaagaccatgttggtcatcaggtcgcacttagacagcagacccgcacgggtagcgtggttaacgtcagcgccaatctgttcagcaatccagccagccagcgcctggatgcggtcagttttgtcgcgcagcgtccccaactgttgctggaacaacacggtttgcaggcgcggcaggttatcttcaagacgttttttacggtcggtgttgaagaagaactcggcatccgccagacgcggacgaacgactttctcgttaccggagataatctgctgcggatctttgctttcgatgttggcaacgaagataaagttcggcagcagtttgccgtcgttcgcatacaccgggaagtatttctggtcacctttcatggtgtaaaccagcgcttcagccggcaccgcgaggaatttctcttcgaattttgcggtcagaacgaccggccactccaccaggctagccacttcttccagcaggctttcgcttaagtcagcgttaccgccaatcttacgcgctgcttcttcggcatcggctttaatcttcgccttacgttcttcgtaatcggcgatgactttcccacgctcacgcagaatttccggatactgatcggcgttatcgatggtgaattccggctcgcccataaagcggtggccgcgaatcacgcgatcggactgaatgcccagaatggttgccggaatgactttgtcgcccagcagcagggtcacggtgtgcaccggacgcacgaagtgcacgtcgcttgcgccccaacgcatcagtttcgggatcggcagtttcgccagagaagtcgcaaccatattcggcagcagtgcttcggtgctttcgcccttcacatgggcgcgatacagcagccattcgcctttatcggtagtcagacgctcagcctggtcaacggtaataccgcaaccacgcgcccaaccttctgccgctttgctcggtttgccttcagcgtcgaacgcctgggcaatcgccgggccgcgtttttcgatttcacgatccggttgcgcttccgccaggttagctactttcagcgccagacgacgcggagcagcaaaccattgaacggtgccgtgtgcgaggccagcgttatccagctccgcagtaaagttcgcagcaaaggactcagccaggctgcgcagtgcttttggtggcagctcttcagtgccgatttccaccagaaaagttttctcagacatagccgcctcttacttatctttgttgcacatcgggaagccgagggcttcacgggaagcgtagtatgcttctgccactgctttggtcagggtgcgaatgcgcagaatgtagcgctgacgctcggtgacggagatggctttacgcgcatccagcaggttgaagctgtgggcggctttcagaatacgctcgtaggctggcagcggcagcggattttccagcgccagcagctgctgcgcttctttctcgtactgctcgaagcaggtgaacaggaagtccacatccgcgtattcgaagttgtaagtggactgctccacttcgttctgatggaacacgtcgccgtaggtggttttacccagcgggccgtcgctccagaccaggtcgtaaacgctgtctacgccctgaatgtacatggccagacgttccagaccgtaggtgatctcgccggtaaccggtttacactccagaccaccaacctgctggaagtaagtgaactgcgtcacttccatgccgttcagccacacttcccagcccagtccccaggcacccagcgtcgggttttcccagttatcttccacgaaacggatgtcgtgaatagtcgggtccatgcccagctctttcagagaaccgaggtacagctcctgaatattgtccgggcttggcttaatgaccacctggaactgatagtagtgctgtaaacggttggggttttcgccgtagcgaccatcggtcgggcgacgagaaggctgaacataagcagccgccatcggttctggccccagctcgcgcagacaggtcattgggtgagaggttcccgcgccgacttccatgtccaatggttgaacaatggtgcagccctggcgagcccagtaatcctgtaaggtcaggatcaagccctggaaggtcctggtatcaaacttttgcatattatttcgtgctggatacgtgtggatttaaaggaagggatcagtatacccgctggatggaagatatacagtacgaaacgggaaaaagcagggcttaacgcatggaaagatgcaaaaaatggccatccgcgtcaaaagaacagacaaactgctctttacggaaggtataaccgcgcatttcatagcttccctggaactgttcgaaggcggtgacgtcgattttttgctcgccggtgttataacgttttgccgcctgatccttgcataacgcttccatattcaagctacgcagaggatcaacctttacccgttgtgctttctgcacgggactcggtatagaacaacccactagcaccataagcgccattgccggaaagaaagcgttcatcatcattaaattaccgtctggtttgcaggtgagtcttattatttatatcggtatagtggctgatatcttacgaatttccttaagcctctataagctgtagtgataaaactcagattattccagtgcgccaaccaaatgatttatcggtcagactttttttaaccagatacagagacacagatgcagcccaaaatttactggattgataacctgcgagggatagcgtgtttaatggtggtgatgattcacaccactacctggtatgtgaccaatgctcatagtgttagccccgtcacatgggatatcgccaatgttctgaattctgcctctcgtgtcagcgtgccgctatttttcatgatttccggctatctcttttttggcgaacgcagcgcccagccgcgccatttcttgcgtatcggcttatgtctgattttttatagcgcaatcgcactgctctacattgcgctgtttacctccatcaatatggagttagcgctgaaaaacctgctgcaaaagccagtgttttaccacttgtggtttttcttcgcgattgcggtgatttatctggttagtccgctgattcaggtgaagaacgtcggcggaaaaatgttgctggtgctaatggcggtgattggcattatcgctaacccaaacacagtgccgcagaaaattgacggttttgaatggctgccaattaacttatatatcaatggcgatactttttactacattctgtatggcatgttgggccgcgctatagggatgatggacacacagcataaagcactgagctgggtgagcgccgcgctgtttgcgacgggggtttttattatctctcgcgggacattatatgaattgcagtggcgcggaaattttgccgatacctggtatctttactgtgggccgatggtttttatctgcgcaatcgcgctattgactctggttaaaaacacgctggatacgcgtaccattcgcggacttggcttaatctcccgccatagtttgggtatatacggattccacgccttgattatccatgcgctgcgcacccggggaattgagcttaaaaattggccaatactggatattatttggatcttttgcgcgacgttggcagcgagtttgttactttctatgctggtacaacgaatcgacagaaacagattagtgagttaagtaaaagcccggtcacattggactgaccgggcttacgtgagttattcgctgtattcttcctgggtaacctgtgtttcttttggtgggtttattccggcatcacgaatatttttctgcaccgctactgcaccaaacaagcttaagaagaaagccagtccataaaaacctttttcgctgagtaataatgtcgcattccacagacctaccatcagtaatgcaacagagataataaagacagtcaggcaggtcatataataaatggaagtggtcggtatgccttcatacttgtcccgaacggtcttttgataagacgccgcagaaaacagtcctaataccagtacggcaaaataatatcctttttcatttaactgcatctctgcattccatagccctaacagataggtaacgataccaccaacgagagctatccaactcacaatactaaaggccggactataggtacttattttgttgtccatcacagtattcctttcattcctgaatatgtaagagctttatgttgctcatgcgctgcgaaacaaacgcatttgaccaaacaagcagacaaaaaaggcgatgggatagatcaccatttcataagtattgataggtgcgtttaaaacaccgataaacaagagaccgatagtgattaacgcaactaactggcagatatgggtaaaaaaatcatccagttgcccgagtttttctgcgcgaagatatgcatagttgccaaaagttgctgtcattaacacgccaagaaaatagccttttccacttaacaatgggcaactgatccatagcccaaccagataaaccagcgccccgacaacaaataatagttttgccacagtcttactggttttcataacgatctccatatctaccagcgatacattacgagtaaccaacgaaagacaaaactgaaaaatgccattaacaaatgattttcagaataaattcatactaaatattaattaattactgagatatatagatgtgaattatcccccacccggtcaggcaggggataacgtttacgccattaatggcagaagttgctgatagaggcgacggaacgtttctcgtcgtggctgataagcggcataacgctgcgcatctggtagatggctctgttctaacggtagttgcggcaacaattcaatgaggcttttctctggattcgccgcgatctgcgccagccttgctgcgcccagtgctggccccacatccccccccgtacggtaatcgagctgctgaccgctgatatccgccagcatctgacgccagtactcactacgcgccccgcccccaatcaacgtaacactttgcggtttaataccgcaggcatgcacgacatccatgccatctgccagcgcataacccacgccttccagcactgctcgcgccagttcattggggccatgttgatgagtcaaaccaaagaaaacccccttcgcctggggattattgtgtggcgtacgctcgccggaaagataaggcagaaaccaaactggctcggcactttcatcagcctgttgagctgcagcgattaaagctgggacattgctcaggccggttaatttcgcggcccaatccagacagctcgctgcactcagcatcacagacattaaatgccaacgttgcggtagcgcatggcaaaagctatgtacggcgctttctggcttgcttaagaacccttcgctgacagcaaaatagaccccgctcgtccccaggcttaacattgcctgattagcatcaaccattcccacaccaactgcaccagctgcattgtcgccaccgcctgcgacaactggcaccgtcgccataccccacgctttcgcaacttcaggtaacaaagcaccagtaatttcgctgccttcgtataatgcgggcatctggtcacgagataagtcgcaagcctgcagcatgacgtcactccagtcacgctttgcgacatccagccacatggtgccagctgcgtcagacatatcgctggcaaactcccccgtcatacgcagacgcaagtaatctttcggtaataatactttgtcgatttgacggaatatctccggctcatgccgctgaacccatagcaatttaggcgcagtaaatccgggcatcatcaggttgccggtaatcacccggctttgcggaactcgcgcttccagcaaagtgcactcttgcgcacagcgcccgtcgttccacaaaatggcagggcgtaacacccgttgctgagcatccagcaaggttgctccgtgcatctggccggcaatacccaatgctttaacgtcctgcagagaatgctgatcgcccagagctttcattgcgcgatcagttgcctgccaccactgttccgggtcttgttcgctccagagtggatgcgggcggctaacggtcagcttttccgtttgcgcagcaaccacctcaccctgctcgttgagcaaaataacttttacgccgctggtgccaagatctatcccgatatacatatcgatcgttccttaaaaaaatgcccggtatcgctaccgataaccgggccaacggactgcacagttagccgttatttgtcgaacagataatggtttaccagattttccagttgttcctggcgaccactctgatgcaccggagacaaatgatgttcctgagcatatttggctaaatctgccagactcatttggcctttcaggatttgctggcccaattcgctattccagccggaataacgctgcgcgatgcgtttatccagctcgccatcttcaatcatgcgcgctgcaattttcagcgccagtgccatcgtatccatcgcgccgatatgaccgtaaaacagatcatatttatcagtactttgacgacgtactttggcatcgaagttcagaccaccggtggtgaaaccgcctgctttgagaatttcatacatcaccagcgcattctcttccacactgttcgggaactggtcggtgtcccagcccagttgcgcatcgccacggttggcgtcgacagaaccgaacaggccaagcgcaatggcggtggctatttcatgatggaaagagtgacctgccagcgtcgcgtggttagcttcaatgttcagtttaatctctttttccagaccaaactgtttcaggaagccatagaccgtcgcggcatcgtaatcatattgatgtttggtcggttcttgcggtttcggttcgataagcaacgtgccctggaaaccgattttatgtttatgctcaaccaccatctgcataaagcggcccagttgttcacgctcctgacgcaagtcggtatttaacagcgtttcgtaaccttcacgaccgccccacaggacatagttttcaccgcccaatttatgggttgcttccatcgctgtaacaacttgcgttgccgcccagctgaagacttcaggatctgggttcgtcgccgcacccgcgccgtagcgagggtttgtaaagcagttggccgttccccacagcagcttcacgccgctctcttcttgcttgcctgccaggacatcaaccatttgcgcaaaattattgatgtactcttttaagctcgcgccctcaggggaaacatccacatcgtggaagcaataaaatggcacatgtaacttgtggaaaaactcaaatgcgacatctgctttacgcttcgccaacgccagtgcctcaccaggctgctgccacggacgattaaacgcccccacaccaaacatatccgccccgttccagcagaaggtgtgccagtagcaggcggcaaaacgcaagtgctcttccatacgcttacccaacaccagttcgtcgggattgtagtgacggaatgctaacgggttactggatttactgccttcataacgaacgcgatcgagctggtcaaaataggcttgcatattgaactccataatcaggtaatgccgcgggtgatggatgatgtcgtaatattgggcactccctttcagttgctcaattatgttatttcacactgctattgagataattcacaagtgtgcgctcgctcgcaaaataaaatggaatgatgaaactgggtaattcctcgaagagaaaaatgcaataagtacaattgcgcaacaaaagtaagatctcggtcataaatcaagaaataaaccaaaaatcgtaatcgaaagataaaaatctgtaattgttttcccctgtttagttgctaaaaattggttacgtttatcgcggtgattgttacttattaaaactgtcctctaactacagaaggccctacaccatgaaaataaagaacattctactcaccctttgcaccagtctcctgcttaccaacgttgctgcacacgccaaagaagtcaaaataggtatggcgattgatgatctccgtcttgaacgctggcaaaaagatcgagatatctttgtgaaaaaggcagaatctctcggcgcgaaagtatttgtacagtctgcaaatggcaatgaagaaacacaaatgagccagattgaaaacatgataaaccggggtgtcgatgttcttgtcattattccgtataacggtcaggtattaagtaacgttgtaaaagaagccaaacaagaaggcattaaagtattagcttacgaccgtatgattaacgatgcggatatcgatttttatatttctttcgataacgaaaaagtcggtgaactgcaggcaaaagccctggtcgatattgttccgcaaggtaattacttcctgatgggcggcagcccggtagataacaacgccaagctgttccgcgccggacaaatgaaagtgttaaaaccttacgttgattccggaaaaattaaagtcgttggtgaccaatgggttgatggctggttaccggaaaacgcattgaaaattatggaaaacgcgctaaccgccaataataacaaaattgatgctgtagttgccagtaacgatgccaccgcaggtggggcaattcaggcattaagcgcgcaaggtttaagtgggaaagtagcaatctccggccaggatgcggatctcgcaggtattaaacgtattgctgccggtacgcaaactatgacggtgtataaacctattacgttgttggcaaatactgccgcagaaattgccgttgagttgggcaatggtcaggaaccaaaagcagataccacactgaataatggcctgaaagatgtcccctcccgcctcctgacaccgatcgatgtgaataaaaacaacatcaaagatacggtaattaaagacggattccacaaagagagcgagctgtaagcgttacgccccagcgcggagcgggggcgtgatttctctccatgccgcgtgaatgaattggcttaggtggagtcgttatgccttatctacttgaaatgaagaacattaccaaaaccttcggcagtgtgaaggcgattgataacgtctgcttgcggttgaatgctggcgaaatcgtcagtctttgtggggaaaatgggtctggtaaaagtacgctgatgaaagtgctgtgtggtatttatccccatggctcctacgaaggcgaaattatttttgcgggagaagagattcaggcgagtcacatccgcgataccgaacgcaaaggtatcgccatcattcatcaggaattggccctggtgaaagaattgaccgtgctggaaaatatcttcctgggtaacgaaataacccacaatggcattatggattatgacctgatgacgctacgctgtcagaagctgctcgcacaggtcagtttatccattagtcctgatacccgcgttggcgatttagggcttgggcaacaacaactggttgaaattgccaaggcacttaataaacaggtgcgcttgttaattctcgatgaaccgacagccagtttaactgagcaggaaacgagcattttactggatattattcgcgatctacaacagcacggtatcgcctgtatttatattagccacaaactcaacgaagtcaaagcgatttccgatacgatttgcgttattcgcgacggacagcacattggtacgcgtgatgctgccggaatgagtgaagacgatattatcaccatgatggtcgggcgagagttaaccgcgctttaccctaatgaaccacataccaccggagatgaaatattacgtattgaacatctgacggcatggcatccggttaatcgtcatattaaacgagttaatgatgtcagcttttccctgaaacgtggcgaaatattgggtattgccggactcgttggtgccggacgtaccgagaccattcagtgcctgtttggtgtgtggcccggacaatgggaaggaaaaatttatattgatggcaaacaggtagatattcgtaactgtcagcaagccatcgcccaggggattgcgatggtccccgaagacagaaagcgcgacggcatcgttccggtaatggcggttggtaaaaatattaccctcgccgcactcaataaatttaccggtggcattagccagcttgatgacgcggcagagcaaaaatgtattctggaaagtatccagcaactcaaagttaaaacgagctcccccgaccttgctattggacgtttgagcggcggcaatcagcaaaaagcgatcctcgctcgctgtctgttacttaacccgcgcattctcattcttgatgaacccaccaggggtatcgatattggcgcgaaatacgagatctacaaattaattaaccaactcgtccagcagggtattgccgttattgtcatctcttccgaattacctgaagtgctcggccttagcgatcgtgtactggtgatgcatgaagggaaactaaaagccaacctgataaatcataacctgactcaggagcaggtgatggaagccgcattgaggagcgaacatcatgtcgaaaagcaatccgtctgaataacgcattgaggagcgaacatcatgagcaaaagcaatccgtctgaagtgaaattggccgtaccgacatccggtggcttctccgggctgaaaagtctgaatttgcaggtcttcgtgatgattgcagctatcatcgcaatcatgctgttctttacctggaccaccgatggtgcctacttaagcgcccgtaacgtctccaacctgttacgccagaccgcgattaccggcatcctcgcggtaggaatggtgttcgtcataatttctgctgaaatcgacctttccgtcggcagtatgatggggctgttaggtggcgtcgcggcgatttgtgacgtctggttaggctggcctttgccacttaccatcattgtgacgctggttctgggactgcttctcggtgcctggaacggatggtgggtcgcgtaccgtaaagtccctagttttattgtcaccctcgcgggcatgttggcatttcgcggcatactcattggcatcaccaacggcacgactgtatcccccaccagcgccgcgatgagtcaaattgggcaaagctatctccccgccagtaccggcttcatcattggcgcgcttggcttaatggcttttgttggttggcaatggcgcggaagaatgcgccgtcaggctttgggtttacagtctccggcctctaccgcagtagtcggtcgccaggctttaaccgctatcatcgtattaggcgcaatctggctgttgaatgattaccgtggcgttcccactcctgttctgctgctgacgttgctgttactcggcggaatgtttatggcaacgcggacggcatttggacgacgcatttatgccatcggcggcaatctggaagcagcacgtctctccgggattaacgttgaacgcaccaaacttgccgtgttcgcgattaacggattaatggtagccatcgccggattaatccttagttctcgacttggcgctggtagtccttctgcgggaaatatcgccgaactggacgcaattgcagcatgcgtgattggcggcaccagcctggctggcggtgtgggaagcgttgccggagcagtaatgggggcatttatcatggctagtctggataacggcatgagtatgatggatgtaccgaccttctggcagtatatcgttaaaggtgcgattctgttgctggcagtatggatggactccgcaaccaaacgccgttcttgattttgataaaaattttctcaaagccggttacgtattaccggttttgagtttttgcatgattcagcaggaaaagaaccatgtttactaaacgtcaccgcatcacattactgttcaatgccaataaagcctatgaccggcaggtagtagaaggcgtaggggaatatttacaggcgagtcaaagcgaatgggatattttcattgaagaagatttccgcgcccgcattgataaaatcaaggactggttaggagatggcgtcattgccgacttcgacgacaaacagatcgagcaagcgctggctgatgtcgacgtccccattgttggggttggcggcagctatcaccttgcagaaagttacccacccgttcattacattgccaccgataactatgcgctggttgaaagcgcatttttgcatttaaaagagaaaggcgttaaccgctttgctttttatggtcttccggaaagtagcggcaaacgttgggccactgagcgcgaatatgcatttcgtcagcttgtcgccgaagaaaagtatcgcggagtggtttatcaggggttagaaaccgcgccagagaactggcaacacgcgcaaaatcggctggcagactggctacaaacgctaccaccgcaaaccgggattattgccgttactgacgcccgagcgcggcatattctgcaagtatgtgaacatctacatattcccgtaccggaaaaattatgcgtgattggcatcgataacgaagaactgacccgctatctgagccgtgtcgccctttctagcgtcgctcagggcgcgcggcaaatgggctatcaggcggcaaaactgttgcatcgattattagataaagaagaaatgccgctacagcgaattttggtcccaccagttcgcgtcattgaacggcgcagtacagattatcgcagcctgaccgatcccgccgttattcaggccatgcattacattcgtaatcacgcctgtaaagggattaaagtggatcaggtactggatgcggtcgggatcagccgctccaatcttgagaagcgttttaaagaagaggtgggtgaaaccatccatgccatgattcatgccgagaagctggagaaagcgcgcagtctgctgattagtaccaccttgagcatcaatgagataagccaaatgtgcggttatccaagcctgcaatatttctactctgtttttaaaaaagcatatgacacgacgccaaaagagtatcgcgatgtaaatagcgaggtcatgttgtaacgatgatgagaattgtcggcgtcacatcaggtaacgctgcgtggttgtcggatgcggcgtgaacgccttatccgacctacccgccaggcatgataaaacgcaccaacaacgcttcaggctcgtagctcaactgcctgagacaaagtaaaaagccttatccgactgacaagtcggataaggctcaaggaaatgcaattacatatgcgccgcgattaaccgttggttatcctggtacattgcgaacaggtagttgttataactcttccctttggtgctgtagcccttcagcttgtgaatcatcgctgtggcagtcacttcctgatccgctttacgcagctgcgcacggcttttacggaagctagagtaagccgggtgcgtattcaggttagtgacataggcgctcacgctttctttgacagaactaaactgactgtaccctttcactttacctggcgcattggtacaacgtcctttcatgcatttcatgccgaacaggttgttgttgttgcgcgccagcttgctcgttccccaaccgctttctgctgcagccatcgtcgccaccatactggtggggataatgtctacgcgttcaagcaaggtattccacgggatttttcgcgtattaccggaccacttcaccttgtagcgtttggcgatgtctttcagacgcgcacgctcagcaggactccattggccctgatactgtttactaatgagccagttacgttccgcagtaatggccgcattttggctggtaatgtaaggcattacggtccggagaaacgcctttttccttggtgttccggaagggtattttcgcaaatcaggaagactactactctttgcactattgcgagaatactcttgtttactgcttacctgtttattactagctttagttaagtgggacttttgactcgctgttgttgtgtgcgtcttcgctaacacctcactgctaaacaccagagtgagtaacataagaatcatcgccccatatcgtcgtatgggagtcaaaatcatcaggtctcctggtcggatttaatcattccaacaccttatatttttcacaaatttgagagttgaatctcaaatcatatcaaaaatagctgtcaagagcaccccaaggaatagtccaaatctgaaactatgtcacgtgttaacgattcagattggcgctaaatcgcagaaaatgtgggggttatcgcaaaattcagccgttttttgcgcgagatcgctcacccttgcttctcatcctgtggacttaccgctcagggatgagttttgtttggcttatcgctggcaaactgtctgaaatcgcagcaataaggactcatccgccatgaaactcgccgcctgttttctgacactccttcctggcttcgccgttgccgccagctggacttctccggggtttcccgcctttagcgaacaggggacaggaacatttgtcagccacgcgcagttgcccaaaggtacgcgtccactaacgctaaattttgaccaacagtgctggcagcctgcggatgcgataaaactcaatcagatgctttccctgcaaccttgtagcaacacgccgcctcaatggcgattgttcagggacggcgaatatacgctgcaaatagacacccgctccggtacgccaacattgatgatttccatccagaacgccgccgaaccggtagcaagcctggtccgtgaatgcccgaaatgggatggattaccgctcacagtggatgtcagcgccactttcccggaaggagccgccgtacgggattattacagccagcaaattgcgatagtgaagaacggtcaaataatgttacaacccgctgccaccagcaacggtttactcctgctggaacgggcagaaactgacacatccgcccctttcgactggcataacgccacggtttactttgtgctgacagatcgtttcgaaaacggcgatcccagtaatgaccagagttacggacgtcataaagacggtatggcggaaattggcacttttcacggcggcgatttacgcggcctgaccaacaaactggattacctccagcagttgggcgttaatgctttatggataagcgccccatttgagcaaattcacggctgggtcggcggcggtacaaaaggcgatttcccgcattatgcctaccacggttattacacacaggactggacgaatcttgatgccaatatgggcaacgaagccgatctacggacgctggttgatagcgcacatcagcgcggtattcgtattctctttgatgtcgtgatgaaccacaccggctatgccacgctggcggatatgcaggagtatcagtttggcgcgttatatctttctggtgacgaagtgaaaaaaagcctgggtgaacgctggagcgactggaaacctgccgccgggcaaacctggcatagctttaacgattacattaatttcagcgacaaaacaggctgggataaatggtggggaaaaaactggatcagaacggatatcggcgattacgacaatcctggattcgacgatctcactatgagcctagcctttttgccggatatcaaaaccgaaagtactaccgcttctggtctgccggtgttctataaaaacaaaatggatacccacgccaaagccattgacggctatacgccgcgcgattacttaacccactggttaagtcagtgggtccgcgactatgggattgatggttttcgggtcgataccgccaaacatgttgagttgcccgcctggcagcaactgaaaaccgaagccagcgccgcgcttcgcgaatggaaaaaagctaaccccgacaaagcattagatgacaaacctttctggatgaccggtgaagcctggggccacggcgtgatgcaaagtgactactatcgccacggcttcgatgcgatgatcaatttcgattatcaggagcaggcggcgaaagcagtcgactgtctggcgcagatggatacgacctggcagcaaatggcggagaaattgcagggtttcaacgtgttgagctacctcagcagccatgatacccgcctgttccgtgaagggggcgacaaagcagcagagttattactattagcgccaggcgcggtacaaatcttttatggtgatgaatccagccgtccgttcggtcctacaggttctgatccgctgcaaggtacacgtagcgatatgaactggcaggatgttagcggtaaatctgccgccagcgtcgcgcactggcagaaaatcagccagttccgcgcccgccatcccgcaattggcgcgggcaaacaaacgacacttttgctgaagcagggctacggctttgttcgtgagcatggcgacgataaagtgctggtcgtctgggcagggcaacagtaacttttccggcttcccgttcgtcagtacctcgggaagccgccaaccaggataaaatgtcagccctaatcagcgttgcaggataaagcaccgctcactcttcaacagaccgatttgcaccccagcaaatgtagcgttattgttaccttccttgctacagagttcgacagatatcccgctatgacattctccctttttggtgacaaatttacccgccactccggcattacgctgttgatggaagatctgaacgacggtttacgcacgcctggcgcgattatgctcggcggcggtaatccggcgcagatcccggaaatgcaggactacttccagacgctactgaccgacatgctggaaagtggcaaagcgactgatgcactgtgtaactacgacggtccacaggggaaaacggagctactcacactgcttgccggaatgctgcgcgagaagttgggttgggatatcgaaccacagaatattgcactaacaaacggcagccagagcgcgtttttctacttatttaacctgtttgccggacgccgtgccgatggtcgggtcaaaaaagtgctgttcccgcttgcaccggaatacattggctatgctgacgccggactggaagaagatctgtttgtctctgcgcgtccgaatattgaactgctgccggaaggccagtttaaataccacgtcgattttgagcatctgcatattggcgaagaaaccgggatgatttgcgtctcccggccgacgaatccaacaggcaatgtgattactgacgaagagttgctgaagcttgacgcgctggcgaatcaacacggcattccgctggtgattgataacgcttatggcgtcccgttcccgggtatcatcttcagtgaagcgcgcccgctatggaatccgaatatcgtgctgtgcatgagtctttccaagctgggtctacctggctcccgctgcggcattatcatcgccaatgaaaaaatcatcaccgccatcaccaatatgaacggcattatcagcctggcacctggcggtattggtccggcgatgatgtgtgaaatgattaagcgtaacgatctgctgcgcctgtctgaaacagtcatcaaaccgttttactaccagcgtgttcaggaaactatcgccatcattcgccgctatttaccggaaaatcgctgcctgattcataaaccggaaggagccattttcctctggctatggtttaaggatttgcccattacgaccaagcagctctatcagcgcctgaaagcacgcggcgtgctgatggtgccggggcacaacttcttcccagggctggataaaccgtggccgcatacgcatcaatgtatgcgcatgaactacgtaccagagccggagaaaattgaggcgggggtgaagattctggcggaagagatagaaagagcctgggctgaaagtcactaaaaattgcctgatgcgctacgcttatcaggcctacatgatttctgcaatatattgaatttggaagaatttgtaggccggataaggcgtttacgccgcatctggcataaacaaagcgcactgttccggcgttgagaaacgccggaaaacgtttcaaacaggctgctgccgtagccgatgccgctgcactttctcgacatccatgcactgcaacgcctttgtcgggcaggcttcaacacaggccggtcccgtctcccgatgccagcacagatcgcacttaatcgccctcgcctttttgcggctagaaacgacctccatcgcaccaaacgggcaagccagcatacagcttttacagccaatgcaacgtgtttgttcaacgaaaatatgcccatgttcgcggcttatcgcgtcaacagggcagacattcgcgcacggtgcatcttcacactgatgacaggctactgccgtggtccagcagtggtctttaatgacacgaatacgggaaataaactcgtctggactcaacgcagcgcaatcctgattctcatgatggctcactgcgcaagccacttcacaggtacggcaaccgatacatttcgtcgcatccgcaataataaaccggttcatgatcactcctttgcactaaaacagcagagtgccagagagcgcgtccctactgctttgatccaacgaaggaaatgttaaagttttggcacttgtccaaagcgttatgtgatcgcgcccaggtcatccctgacagtaaatcccagttcattagaaatagcctgcgcggtttcacgcagtggtttcaggagatttttctctcccacctgtttcagacgacttgtgctaaggctaatgctcacggcgtacggcacccgcccatgaatatcaaacaccggaacagcaatacaggagacgccgagttcgttttcttctctgtccatcgccgctccgctttcacgaatgtgcgccagttcgtcgaacatcgcgggcagctcggtaatggtattgcgggttaacggctggatctcatgctgatggctttcccagtaactcttcacgtagtccgggtgaccaaacgccatgtagatcttgcccattgcggaacagtagagcggcatatgctggccaatataggcacgggttcgcagcatcccggttgtgggttccagcttataaatcaaaatagcgtgatcgtcttcgcggctggagaagttaatggtttcaccagtggcgatgttcagtgcctcaagatgcggagcggcgatatgaatgatattcaggctagacagcgccttctgcccgacggcaataaatttggtggtcaggcgataactccctgcggcaggcgcggtggtcacatagccgcaggactgtaatccctgcaataagcgatggacggtactcttatttaaaccagccagctcgctaagatgcgccaacggacaaccgtttggatagttgctcaaaatctcaatcagcatcaacccgcgaaacagactctggcttccggctggacgctctttttcctgcgccatctcgttctctttttttcccatcacttctttccccattttgtcgcgtcctgatggtagcgcaaagtgtgccgtagttcacgatctcgacagataatttataaccaattgatttttatgtcttttgaaattcatcaatcagattgccttgttaaaaagtgatcgatatatttgaaatcaagtttcgcatattgaaattttaagccaaaaaagcgatcaaaaaaacaaggaagcctgggatgaaagtgacatttgagcagttaaaagcagcctttaatcgggtcttaattagtcgcggcgttgacagcgaaacggctgacgcctgtgcagagatgttcgcccgcaccaccgaatccggcgtttattctcacggcgttaatcgtttccctcgtttcattcaacaactggaaaacggcgatatcattcctgatgcccaacccaaacgtataaccagcctcggcgcaattgaacagtgggacgcccagcgtagcatcggtaacctgacagcgaaaaagatgatggatcgcgccattgaactggctgccgatcacggtattggtctggtggcactacgtaatgccaaccactggatgcgcggcggcagctacggctggcaggcggcggaaaaaggctatattggcatttgctggaccaactccatcgccgtaatgccgccgtggggcgcaaaagagtgtcgcataggcactaacccgctgatcgtcgccattccttccacgccgatcaccatggtcgatatgagcatgagcatgttctcttacggcatgttagaagttaaccgtctggcaggtcgtcagctcccggtcgatggtggctttgatgatgagggcaatttgaccaaagaacctggcgttatcgagaagaatcgccgcattttgccgatgggctactggaaaggttctggcatgagcattgtgctggatatgatcgctactctcctttccgacggcgcatccgttgccgaagtcacccaggacaacagcgacgaatacggcattagtcaaatttttattgccattgaagtggacaagcttatcgacggtcccacccgcgatgccaagctgcaacgcatcatggattacgttactagtgccgagcgtgctgacgaaaatcaggccattcgcttacccggccatgaatttactaccctgctggccgaaaaccgccgtaacggcatcactgttgatgacagcgtgtgggccaaaatccaggcgttatgaggagataagtcatgatttttggacatatcgcgcagcccaatccgtgccgtttgcccgccgccattgaaaaggcgctcgattttctgcgcgctaccgatttcaacgccctggagccgggcgttgtcgaaatcgacggcaaaaatatttatacgcaaattatcgatttaaccacacgcgaagcggtggtaaaccgtccggaagtgcatcgtcggtatatcgatattcagtttctggcgtggggcgaagagaaaatcggcattgctattgatacgggaaataataaagtcagcgaaagtctattagagcagcgcaatattattttttatcacgacagtgaacatgaaagttttatagaaatgataccgggcagctacgcaattttctttccgcaggatgttcaccgaccaggttgtattatgcaaacagcctctgagatacgaaaaattgtggttaaagtcgcattaacggcgctgaattaatcgaataatcgtctacgccagaacgcctgggtaatgttattgctctaactatattaataattcaggttgctgcacatgcgacttgaattatgacagacatagcctcaaggaatagctatgaaaaaaatactcgaagcaatactggcgattaatctcgccgtactttcctgtattgtatttataaacattattttaagatatggttttcagacaagcattttatctgttgatgaattgagtcgttatttatttgtctggttaacgtttattggcgcgattgtagcttttatggataacgcccacgttcaggtcacctttctggtggagaaactctcccccgcatggcagcgacgagtcgctctggttacccattccttaatcttatttatttgtggcgcactggcctggggcgcaacgctaaaaacaattcaggactggagcgattatagtccgatcctcggtttacccatcggcctgatgtatgccgcttgtctgcccaccagcctcgttatcgcattctttgaactgcgtcatttatatcaactcatcacgcgtagcaattctctaacgagcccaccgcaaggagcttaatcatggctgtgctgatttttctgggctgtctgttgggtggtattgctatcggtttgcctattgcctgggcactgttgttgtgcggggcggcgttaatgttctggctggacatgtttgatgtccagatcatggcacaaacgctggtgaacggagccgatagcttctccctgctggcgattccgttctttgtgctggcgggtgaaatcatgaatgcgggcggcttgagtaaacgcattgttgacctgccgatgaaactggtggggcataaaccaggcgggctgggctacgtcggcgtgctggcagctatgattatggcgagcctttctggttctgccgttgcggataccgccgccgttgccgctctactggtgccgatgatgcgcagcgccaactatccggtcaaccgggcggcggggctgattgcctctggcggcattatcgcgccaattattcccccttccattccgtttattatcttcggcgtttccagcggattatccatcagtaagctgtttatggcgggcattgcccctggcatgatgatgggcgcaacgctgatgcttacctggtggtggcaggccagtcgccttaatttaccccgccagcaaaaagcaacgatgcaggaaatctggcactcttttgtctccggtatctgggcgctgtttcttccagtcatcattattggcgggtttcgctccggcctgtttacccctaccgaagccggggccgttgctgctttctatgcgctgtttgtcgccacagttatttaccgtgaaatgaccttcgccacactttggcatgtactcattggcgcggcgaaaaccaccagtgtggttatgtttctggtggccagcgcacaagtttccgcctggctgattaccattgctgaactgccgatgatggtttctgatttactgcaaccgttggtcgatagtccgcgtctgctgtttatcgtcattatggtggctatcctgattgtcggcatggtcatggatttaacgccgacggtattaattcttaccccggtattaatgcctttagttaaagaggcaggaatcgatccgatttatttcggtgtcatgtttatcattaactgcagtatcggcttaattacaccgcctatcggtaatgtacttaacgttattagtggggtggcaaaactcaaattcgatgatgcagtcagaggcgttttcccttacgtcctggttttatatagtttattagtcgtatttgtttttattcccgatctcatcatcctccctttgaaatggattaattaaaaggaaaatattatgaaattacgctctgtaacctacgcattattcattgctggcctggctgcattcagcacatcttctctggcggcacaatctttacgtttcggttatgaaacaagtcaaaccgacagccaacatattgcggcgaaaaaattcaatgatttattgcaggagagaaccaaaggcgagctgaaattaaaactgttcccggacagcactctcggtaacgcgcaggcgatgatcagcggcgtacgtggcggcaccatcgatatggaaatgtccggcagcaataactttgccgggttaagtccagtgatgaacttgcttgatgtccctttcctgttccgcgataccgctcacgcgcataaaacgctcgacggcaaagtcggtgatgatctgaaagccagtcttgaaggtaaaggactgaaagtactggcctactgggaaaacggctggcgcgatgtcaccaacagccgcgcaccggttaaaacccccgccgacctgaaagggctgaaaatccgcaccaacaatagcccgatgaatatcgccgcattcaaagtctttggcgctaacccgatcccgatgccgtttgccgaagtctataccgggctggaaacccgcactatcgacgctcaggaacacccgatcaacgtcgtctggagtgcaaaatttttcgaagtgcagaagttcctttctctgacgcaccacgcctattccccgcttctggtggtgatcaacaaagcgaagtttgatggcttaagtccggagttccagcaggcgctagttagttctgcacaagaagcgggtaactatcagcgcaaactggttgctgaagatcagcaaaaaatcatcgacggcatgaaagaagcgggcgtggaagtcatcaccgatctcgaccgcaaagcctttagcgacgcactggggaatcaggttcgcgacatgtttgttaaagatgtgccgcagggagctgatctgctgaaagccgtggatgaggtgcaataaaccatgacgcaatactggctggggttagattgtggcggtagctggctgaaagccgggctgtatgaccgcgaaggccgggaggcaggcgtgcagcgcctgccgctgtgcgcattaagcccgcagccaggctgggcagagcgcgatatggcagaactgtggcaatgctgcatggctgtcattcgcgccctgcttactcattctggtgttagcggggaacaaattgtcggtatcggcatctccgcacagggaaagggcttgtttttgctggataaaaacgacaaaccgctcgggaatgctattttgtccagcgaccgccgggcgatggaaatcgttcgtcgctggcaggaagatggcatcccggaaaaactctacccgctgacccgacaaaccttgtggaccgggcatccggtgagcctgttacgctggctgaaagagcacgaaccagaacgctacgcgcaaattggctgcgtgatgatgacgcacgactacctgcgctggtgtttaactggcgtcaaaggctgtgaagagagcaatatttccgagtccaacctctacaacatgagtcttggggaatatgacccgtgcctcaccgactggctggggatcgctgaaatcaatcacgccctgccgcctgttgtcggatctgccgaaatctgcggggagatcaccgctcagacagccgccctgaccggtctgaaagcgggtacgcccgttgttggcggcctgtttgatgtggtttccaccgcactctgcgccgggatcgaagacgaatttaccctcaatgcggtgatggggacctgggcggtgaccagcggcataacccgcggtttacgtgacggtgaagcgcatccgtatgtctatggtcgctacgttaacgatggtgaatttatcgttcacgaagccagccctacctcttccggcaacctcgaatggtttaccgcacagtggggagaaatcagctttgatgagatcaatcaggccgttgccagcttgccgaaggctgggggcgatctctttttcctgccgttcctgtacggcagcaacgccggactcgagatgaccagtggtttctacgggatgcaggccattcacacccgcgcgcacctgttgcaggccatctatgaaggggtggtgttcagccatatgacccacctcaaccgaatgcgcgaacgttttactgatgttcacaccctacgcgtcactggcggcccggcgcactccgatgtctggatgcaaatgctggcggacgtcagcggtctgcgtatcgagctgccgcaggtggaagaaaccggctgctttggtgcggcccttgccgcccgcgtcggcaccggggtttatcacaacttcagcgaagcccaacgtgacttgcgacacccggtgcgcaccctgctgccagatatgaccgcccatcagctttaccaaaaaaaatatcaacgttatcagcatctcattgccgcacttcagggctttcacgcccgcattaaggagcacacattatgagccgaccacttctgcaactggccctcgaccacagtagtcttgaagccgcgcagcgcgacgtgacgctgttaaaagacagcgtcgatatcgtcgaagcgggcaccattctctgtttaaacgaagggcttggcgcggtgaaagccttgcgcgaacagtgcccggacaaaatcatcgttgctgactggaaggtcgccgacgctggtgaaacgctcgcgcaacaggcgtttggcgcaggcgctaactggatgaccatcatctgcgccgcgccgctcgcgacggtagaaaaaggccacgcaatggcacaacgctgcgggggtgaaattcagatagagctgttcggtaactggacgctggacgacgcccgcgactggcatcgtattggcgtgcggcaggccatttatcatcgcggtcgtgatgcacaggccagcgggcaacagtggggcgaagccgatctggcacgcatgaaggcgcttagtgatatcggccttgagctttccattactggcgggattacccctgctgacctgccgctgtttaaagatatccgcgtgaaagcgtttattgccgggcgggcactggcaggcgcggcaaatccggcgcaagtggctggcgatttccatgcgcaaatcgacgctatctggggaggtgcgcgtgcgtaatcatcagttagggatttatgaaaaagcgctggcgaaagatctctcctggccggagcggctggtgctggcaaaaagctgcggttttgattttgtcgaaatgagcgtggatgaaaccgacgaacggctcagtcgtcttgactggagcgccgcacaaaggactagcctggttgccgcgatgatcgaaacaggtgttgggatcccgagcatgtgcctgtccgcacatcgtcgctttccctttggtagccgtgacgaggcagtgcgcgaacgggcgcgggaaatcatgagtaaagcgattcgcctggcgcgcgatctcggcattcgcaccatccagctggcaggttatgacgtctattacgaagaccacgacgaaggcacccggcaacgttttgctgaagggctggcgtgggcagtcgaacaggcggcggcaagtcaagtaatgctggcggtggagattatggataccgcgtttatgaactccatcagcaaatggaaaaaatgggacgagatgctcgccagtccgtggttcaccgtctacccggacgtcggcaacctcagcgcctggggcaatgatgttcccgccgaactgaaactgggcattgaccgtatcgccgcgatccacctgaaagacacccagccagtcaccgggcaaagtcccggacagttccgcgacgtgccgtttggcgaaggctgcgtcgatttcgttggcatcttcaaaacgctgcataaactgaactatcgcggttctttcctgattgagatgtggaccgaaaaagccaaagagccggtgctggagattattcaggcgcggcgttggattgaagcgcgtatgcaggaggctggatttatatgttaacgtaaatgcaggaggctggatttatatgttagagcaactgaaagccgacgtgctggcggcgaatctggcgcttcccgctcaccatctggtgacgttcacctggggcaatgtcagcgcggtagacgaaacgcggcaatggatggtaatcaaaccttccggcgtcgagtacgacgtgatgaccgccgacgatatggtggtggttgagatagccagcggtaaggtggtggaaggcagcaaaaaaccctcttccgatacaccaacgcatctggcgctctaccgtcgctatgccgaaattggcggtattgtgcatacccacagccgccacgccaccatctggagtcaggccgggctggatctccccgcctggggcaccacccacgccgattatttttacggtgccatcccctgcacgcgacagatgaccgcagaggagattaacggcgaatatgaatatcagaccggcgaagtgatcattgaaaccttcgaagaacgtggcaggagtccggcacaaatcccggcggtgctggtgcattctcacggcccgttcgcatggggtaaaaacgccgccgatgccgtgcataacgccgtagtactcgaagaatgcgcctatatgggtctattcagccgccagcttgcgccgcagctccctgcgatgcaaaacgaactgctggataagcactacctgcgtaagcatggggccaatgcctattacgggcagtaatccctcacgccggggcttcatcgccccggcactacgaattgatatgttccttgctgtaacgccgcttccacgctgctggcgttaaaccagtatgtttctgaaaaatctgccggaaatagccaacgtcattaaaccgtattgcatggagcaggccgacaacgtcgagtcactgcataacctgttgctgcccgccgatgcgccatttacgacatttgaaggcaagggattgttcagccataagatcctgattcagacgccaggttcccggtatgaacagagcaatccagagcaacaacctttgtggcattacgacggagcaccagccgcaccgacatccaccggtgaattaaaaacgccagctcaccccggtgacaaaggtaaaactctcattacgatcaatcatcgggctgtcggtaatctcttccggcagctcgctgtatcctgcgctcgccatcaatacgacgtgctctcctatcgggtattttgccgtcaggctgacatagggcacccaggcatcctgcgcggaataacttgccagaccgctacgacgggactcactctcactaatgccatagtaatagtcactgaaattctcgtcataatagagaacgcccagcgcaggtgtcaggctcagacgacctatctgcattttgtggaatacgcttagctcccccacccagccgttgctgttatccagaacgtccgcagctgcagaggctttcacggttccccaacgctcgtggtgataccaggcaacccccgccatagccgtactatcacgcttatcaagctgttgcatggcataatcgtcattatcggtagggtcaaattccagcggcatccaggatgcggtcaggctaagttcatttttttcactttggctcagaataaaacctaacgtggtctgacgaacataaaaagtatcaccttcataactaatcagcggaattgccttcgtattttcattataaccgcgataagggctttcattataagccgcaccagcaccaatggataattcagaagcagttgcgcttgccataaaaggcaacgcaaataacgccacaatattgcgattaattaacatgtccggtattccattttaaaataagataaaaaagagtcggcataataatgcttacaatttctccggtgcaagattcatatttatatagtaatatataaaattatatataattgggctgttgcgatgacaaaattacaacttaagtaccgggagttaaaaattatcagcgtaatcgctgccagtgaaaatatcagccatgccgcgactgtacttggcatcgcacaggccaacgtcagcaaatatcttgctgattttgaaagtaaagtgggtttaaaagtctttgaccgaaccacccggcagctgatgctcacaccttttggcaccgcgctgttaccgtacatcaacgacatgctggacagaaacgagcaacttaataattttattgcagattataagcatgagaaacgtggtcgggtcaccatctacgccccaaccggcataattacctatttatccaaacatgtaatcgataaaattaaagatatcggtgatatcaccttaagcctaaaaacctgcaatcttgagcgtaatgccttttatgaaggcgtcgaatttcctgatgattgtgatgttttaatcagctacgctccaccaaaagatgaaagcctggttgccagttttattacccaatatgccgtaaccgcttatgccagccagcgctatcttgagaaacatcccattagccgtcctgacgaactcgaacatcactcctgtattttgatcgacagcatgatgatcgacgacgcgaatatctggcgcttcaacgtcgccgggagtaaagaggtgcgggattatcgcgtgaagggaaattacgtttgcgacaacacgcaatctgcgctggagctggcacgaaatcacctggggattgtgtttgcgccagacaaaagtgtgcagagcgacctgcaagacggcacgctggtgccctgctttcagcaaccctatgaatggtggctggatctggtggctatcttccgtaaacgggaataccagccctggcgggtccagtatgtgctggatgaaatgctgcgtgaaattcgccaccagcttgctcagagccagcaactgcggcctgaacaagcggcggaaagcgaagattaatgatcgagataaaggtaatgcacccagctggtcatgcgtaatagcactttgcgcatcacgctgacatggctgaaatgatcagagtaaaccgccacctgggcgtaaataccgtctggtaaagcgctcaaatcagtgtgctcatccagttcaatggtcgcgataacgccatcactacccggcgctgtgtttaacgtctgtaaggtgccggtgctctgataagctccgccgggaacggctggactaatggctgccagcttaccgctgaataccttacctggcagagcattaaacaccacttccgcatcgtcgccaggagccagtcgcagcaaggagttctgacggaactgcgccacgatttgtcgtttctgatcgggtataaacaccatcaccggacgtagcggcaggctcgcggcataggtacccggacgaatcagtacctgggtcacataaccatcgctcggcgcacgcactatcgtctgctcaaggttatattttgcttccgcgagctgtgctttcaggctggcgatttgagaatgttcacccaacaccaggctatccagctggctctggatctgtttttgttccgccgcgctactcttcacggaggcttcctgcgccagataattttgccgcgccacatcgatatcgcgttcactaaacgggtttactttcgcctggctgccacgtgcgtaacgctgatactctttagcgaatttatcccgcgtggcctttgcctgctgagtattcgccgccatctcatctaactctgcgcccaacgcccgctgtttatgttctgcggtaacgatatccgccatcagccgatccacccgcgcctgataacgcgtcgggtccagtcgaaatagcacctcaccttttttaatcagcgtatttttcttatccgtcacttcaatcaccacaccagtcacctgtgggacaacaggaatagaaataaccgctttttgcgctttaaaggtatacggatggttatagttcattaacagaattagaccgctgacaataaatattccacccagggccgctgtgggaatggtccatttatttacgggaattttgaagatcttaaacattgcccatgcaaaagccacataggtcaaaataatcagtaaatccataagtattactcggcagaagaggatttgatgtcggcgagctgtttctccagcccggcaatgcgctgttgcagttgcataacggaactatcatggctttgcattccccatccccgctccgggcggtaaagcgtggcccaaatccacaaaaacggccagataacatgtaacgtaaaaagactcacccaaccagcaacatgaatggcgtcggcatgaggatgattacgttttttggcaatcaggtagggaatatcatgtaaaataatgatcccatagaagatcaccagaaatacaaaaataagcactcccagtgcaaaatagtccaggaacatatttccctcaaagaatataaaaaagaacaattaacgcatattatgaaatgccatgatgcagtgcaatttccttatttatataacgacatattgttttttatatactttcttaaatgtgctgtctggtttttcaacaggacgaggtttatcatattgaaatagtggaactattggccaaactaatgaataactccagtaaaacatccacagtacagattaagcgtattaaaccttcaattatctaccgtttattgctgattggcctcggatcaccaatggtgatttacggcctggttcgcccgctcaccatcgaaacgcgagattaaactcctgacaaaacacgccccagaaacgtacttctgttggcgtagtctgggttattgcgcacgtaggtttaaaacgtaaattgtaacaacgtgcgctttgtttatgccggatgcggcgtgtacgccttatccggcctacggtcaggttcccgtaggcatgataagacgcgtaagcgtcgcatcaggcaatgaatacccaatgcgaccagcttcttatatcagaacagccccaacggtttatcgctgtagctcaccagcaggcacttggtttgctggtaatgctccagcatcatcttgtgggtttcgcgaccgataccactttgtttgtagccaccaaacgccgcatgtgccgggtaagcgtgataacagttggtccacacgcgcccagcctgtatgccgcgccccatcttataggccagattaccgttgcggctccagacgcccgcgcccaggccatattgcgtatcgttcgccagctccagcgcttcttccatcgttttgaaggtggtcaccgccagcaccgggccaaaaatctcctcctggaacacccgcatattgttctgaccaaacagaatcgtcggttcgaggtagtagccgtctttcagttcaccttccagcagcttgcgccgcccgcctgtgagcacgtcagcgccctcttttttaccgatatcaatgtagttgaggatggtttccagttgcccgtgagaaacctgcgcgcccatttgcgtcacgctgtcgagcgggttaccgctacgaatgctttcgacacggcggatggcgcgttccataaagcgttcgtagatagattcctgcactaaagcacgactcggacaggtgcaaacttcgccctggttaaaggcaaacagtgcaaagccttccagcgctttatcgaaaaaggcatcttcttcatccatcacatcagcaaagaagatatttgggctcttaccgcccaactccagcgtcaccggaataatgttttgcgttgcgtattgcataatttgttggcccacttccgtactgccggtaaacgccactttggcgatgcgtttgctggtcgccagatattcgccaattaccccacctgcgccattgaccacgttcaccacgcccggcggcagtaaatcaccgacaatttccattagcagcagtacagaaagcggggtaagacgtgcgggtttcagcaccacacagttgcccgccgccagcgcgggagccattttccagctcgccatcagcagcgggaagttccacgggataatctgccccaccacgcctaacggttcatggaaatgataggccacggtttcgctatcaacttcactgatcccaccttcctgcgcccgaatacagctggcgaaatagcggaaatggtcaatcgccagcggtacatccgcagcactggtttcgcgaatgggtttgccgttatcccaggtttcagctgtcgctaacagctcgaggttttgttccattcgatcggcaatcttaaacagaatcgccgcacgatcctgcacgctggtgtgcgcccatttatctttcactttgtgcgcagcatccagcgccagatcgatgtctcgtttgccgctagacgccacttcgcacagcagctgcccggtcaccggcgtcagattctggtaatactcgccgtcggcaggggctacccattcgccgccaataaagttgtcatagcgggcttttaacttgagggggaaaccatactcgccgggcttaatctgtgcactagggggattattggtcatgatcgtctccttgcggtgtgaggtataacaagggtagacgtgactggcgaaatcttcgccagtcggtaacagctttacgacagctatcacgaatttacgggcaagggttacagagatagttgaaaaagcggctaacaatttgccagccgttgtggaaatgatgattacatcgctgcgcgataaatcgccacaatttcttcgtgagttgcctggatcgggttagtaaagccacaggcatctttcagggcattagtcgccaataccgcgaaatcttcttctttcacgttcaggtcgcgtaggcctgccgggatatccactttcttcgccagttcacggatggcgttaatgcaggcttcagcaccttccgcgtcgtttttacctgtcacgttcacgcccattgcagcggcacagtcacgcagacgtgcagcggcgactttgctgttgaatacctgaacgtgcggcagcaaaacggcgttacatacaccgtgtggcaggttgtagaaaccgcccagctggtgcgccatcgcatgaacataacccagagaagcattattgaacgccataccggcgaggaactgggcataagccattgcttcacgcgctttcgcattactgccatcttcaacggctaacggcaggttttcggcaatcatggtcacggctttcagtgcacaagcgtcagtgatcggcgtggcggcaatagaaacatatgcttcgatagcgtgcgttaaggcatccatacccgttgcggcggtcagactcttcggcataccaatcatcagagaggagtcattgacagaaagcagcggagtgacatgtttatcaacaatcgccattttgatatgacgcgcttcgtcagtgatgatgcagaaacgggtcatttcagaggccgtacccgccgtggtattgatggcgatcatcggcagctgcggttttgcagagcggtcaacgccttcgtaatcgcgaatatcgccgccattggctgccaccagcgcaataccttttgcgcagtcgtgtggagaaccaccgcctaaggagatcacgctatcgcaattattctctttaagtaatttcaaacctgcggcgacgttttccgtggtggggttaggttgggtgccatcataaataacgctaaaaatattgcgttcttccagtgctttttgcacatcgcccgccatacctaatttcgttaacatattgtcagtgacaattaaggtacgggtaaatccataatctgccatcatattcattgcatcagtcaaactatcagcgccgatgacattcacagaaggaataaagaacgtactagctgccataacacactcctgaaagtgtaaaaaagggcgggcagcttactgaggattttcattcgaaaatatgatcagtattattgattatcaaaattaatctaataaaaagcacattgtattcattaaacaatgtgctttttttaaattcataagaattttgtattaatttattttaaaacttaattaatcatttccttatttttccggaaataataatgcgtcgcgcaataaatgatcatttccacgacgacgcgtaaagccaatgcggtcaaaatattccagaatctgaattgccagctttcggcctacgcctaagcgatcgcggaaatccgccgcgcaggtactaccacactcctgatcgagatcgcggatcatattggcaaactcgacaatccgatcgttacggtaataacgatctttaacgatcgcggtaattattccttgctgcgccgcctggcgtagagtcaggcgcattgcctgctcgtcggttcccgtctcttttgccaggtcacgcacccaccacggttcgtcaccaaacagtggctctgctttttgccagatggcctgctgctcttcgctgaagcccgctttgtgatctggcagatgcagccagccgtgatggctgtggatgtcgccgctttcgcgcatcttttcaatcagcaacagtaccagcgcttcatcttccattggcaacgccatacgtcgcagacgttcgcgcccagggccaggttcatcgcgatgttgctcatgataagtcgctaatgtgtcgagaattttccgctgccagcgggcggcaaccggcgcattcaacaagctataaccagcctgaatataaccaggctgttgcagcaattcgcgcatcccttcgccgttgagctggcgcgcccaggcgaaatccgcaaggttaaccgcgccgcgttccagatgaacagataacgcatcggcatcgctctgcgcccgtgcaagagacgccagccattgcagatattccggcttacgtttaccgcgacgcggcgggttaagcatcacgacgcgcgctccggccagcgtgttgcgggcagagatatcgcgcaataccaggcggtcgttatctgccagccataacggggtgtcgaagaccagttcagcaaggttatcttccagcagactaacgcgtcccgtgacgtggctggcggcgtggtgaatatgcagcggctgccactgggtcagcggtgtatgggtttgaagctcgacaatcacccgtgtgaacggctctggcggcacatcggcaagcagccagtcgccacggttaatctgctctttttccgcatcacccgcgatgttaagcgcgatacgctgcccggcattggcggtttctgttggctggttttgcgcatgcagcgcacgtacacgcatcggtttatttacaccagtcagccagagactatcgcctaccttcacttccccgcttaacgccgtaccggtgacgaccagcccggcaccttttacggtaaatgcgcggtcaatcgcgaggcggaaactatgttggctggcgtgctcgcgttccggcaactgaagcagatgctcgcgcagggcatccattccccgaccttcggttgctgcggtgataaacagttttgcctcagcaaaaccgtattcccgcagaacctcctttacctggcgttcaacctcatcaacacgcgcttcgtccacgcgatcggctttggtcagcgccactgtcagcatcgggttaccggtcagctgcaaaatcgccagatgctcacgggtctgtgccatcacgccgtcatcgcacgccaccaccaacagcgcgtgatcgataccaccaacgcccgccagcatgttggaaagaaacttttcatgaccgggaacgtcgataaaaccaggcacgcgaccatccggctgcggccagtaggcatagccgagatcgatggtcatgccgcgctttttttcttccggcagacggtcagcatttacgccagtaatcgcctgcaataaggttgttttgccgtggtcaacgtgtccggcagtcgcaataatcatttcaacaacatctccaaaaaccgttgctcatcttcaaggcagcgtaaatccagccacaatcgtccgtcataaatacgaccaatcaccggcactggcaattcacgccagcgggcggctaaactctcaaggtggctaccgcgtccatcatggggtgtaaacgttaatgccgcgctcggcaggcgatcaaccggcaggctaccactgccaatctggctaagacatggcataacctgtaccgcaaactccgcgccgtaatgtgcggcaaggggggcctgtaaacgttgtgcctggatttgaatgacctctgcgctgcgggtaagcaggcgcagggtcggtaatttttcactcagagcttcagggtgtaaataaagacgcaacgtggcttccagcgccgcgagggtcattttatccgcgcgtaatgcacgcttcagcgggtggctttgcaggcgggcgatcatctcttttttaccaacaataattcctgcctgcggcccgcctaacaacttgtcgccggagaaactcaccagactgacgcccgccgcaatcaactcctgcggcattggctctttcggcaaaccgtactggctaagatcgaccaggctgccactgcctaaatcagtcactacgggaacatccagctctttgccgagcgccaccagttccgcttcatctatcgctttggtgaacccctgaatgctgtagttactggtatgtactttcatcaacagtgcggtattttcattcaccgcctgacgataatcattcgcgtgcgtgcggttggtggtccctacttcgtgtagggtgcagcctgcctgacgcataacatcgggaatacgaaacgcgccgccaatctccaccagttcgccgcgagataccaccacctcttttccgctggcagtggccgccaacatcaataacaccgccgccgcattgttattgacgatacaggcatcttccgcccccgtaatacggcacagcagctgcgccagcgcccgatcgcgatgtccgcgtccggcgtcgtccagatcatactcgagggtcactgggctacgcatagcctgcgcaacggcttccaccgcggcttccgcctgtaaagctcgcccaaggttggtatgcagcacggttcccgtcaggttgatcaccggacgcagcgcgctctgcgcttctttcgtcaaccgggcatcgacttcttgcgcccagttttcacaccacgcaggcagcgtctggctgccacgaatcacttctcgcgcttcgtcgagcatctgacgcaacaattccaccacgcgggtgtgaccataagtatcacgcaaagaaaggaaggagctatcgcgcaataagcgatcaatagccggaagttgactatagagggaacgcgtttcggttgtcataggaaacctggctgatcaaggccctctcacacggagaagggcgtttaacataaccacggattgtaacgtgagatgggtcaggaggacatatcgcgcatcaagcctttggcggttcggtgcgagcaaaactttcgcggctaaacaggttttcgaccagtttgactaagtgtgggcggtcgacacaccaacctggcgcaacgcggcggaaattgagatatccgacggcacaggcaatggcgatagtcgccagattgaccgtatcggttttgagtgtgccatcgaccagatatccttccagcacatccagactgcggttgattttctcccgctggcgtaacaattcatcttcagactgctgcgccgctggacgcgcctgttcacgcacgcttaccagcccggcatccataatgccatccgccagtgcctcaattttgcgcacccgcaagctctccagcggatcgcgcggcaacatcgccggagcgacattcattaattcaatatattcagcgatgatcgggctatcaaaccagcattcgccctcttcggtcaccagcaccggcacttttcctaacgggttaaattgcgccacgccgttgtccgcgttatagggcagttcattaataaattcgaaagttatgcccttttctaacaacagaatagaaagtttgcgtacaaacgggctggtgtagctaccgacgagtttcatgccgagtcctttgtgcgaggaaaaatatcagtatggctcaatgatccaaataaagataatgcatccagctggtcattcttagcagcactttccgcatcacgctaacatggctgaaatggtcggagtaaaccgccacctgggcgtagatgccgtcgggtaaggcatcgatatcatcgttagggtccagttcaatggttcccagcacaccgtccgtgccgggcacgaccgttaaactttgcaataccccctgcgcctgataagaaccgcctggcacgacaggtaaaatactagtcagtttgccgtgaaacacctgcccaggtagcgcgttaaacaccacttccgcatcatcgccaggtttcagacgtaacaggctgttttgccgaaattgggcgacaatttgccgtttttgctcggggatgaagaccatcaccggacgcagcggcaaggcagctgcgtatgtacctgggcggatcagtacctgagtaacgtagccattgctcggcgcgcgaatgacagtctgctcaaggttatattttgcttcagtaagttgcgctcttaagctcacaatctggctttgctcgccgttaaccatactgtcgagctggctctggatctgcgcctgctccgccacgctgcctttcaccagcgcatcctgcgcgaggaaattttgccgcgcatcgtcgatgtcacgttcgctgaacggattcaccgccgcctggctgcctttcaagtaacgttgataatttttaaacagacggtcgcgctccgcactaacctgggtggtgttggcctgcgcttcagtgagctgcgcacgcagcgtctttatattatgcgtcgccgtcatcaggtcagcctgaagtctgtcaactcgcgcctggtaacgaaccgggtcgagcttaaaaagcacctcgcccttttgaataagctgattattcttgtcagtgacttcagtaacaattcccgtcacctgtggcgtgatagggatcgctatcactgccttttgcgcggtaaaagtgtaagggtggttgtagttcatcaacaaaatcaaaccactcaccagaaacacgcctcccagcgccgccgtcgccagcgtccactgatttaccggaatgcggaagattttaaagaccgcccacgccagcgccacgtaagttaaaacaatcaatagatccataattagatctccgggaacgtggaatagtcagtctttttctcggcggcgagttgatgctccagccgggaaattcggtcagaaagtgcggcgatttccgggtcagtcgctttctcctggctcgcaacatgactctgcataccccagccacgctccggttgatagagcgtcgcccagatccacagaaacggccagataacatgcagagtaaacaggctcacccagcccgccgtatgaatagcgtcggcatggggatggttgcgctttttggcaatcagataagggatgtcatgtatcgcgatgattccataaaaaatcaccagaaagacgaagatcagcactcccaacgcgaaatagtttagaaacatatctgcctcggattcacgtttatcagtgttgtttttgggctggcagccagaagggagtcaggctgatattttgacaataatccgggttcgcgattctcgccataacaccaaagaataatttttagaggtgatgagttgcttagttacataacgattgtatgacgaaggcataacatgctgtagatcacatcaggtgaacgccgtaagaaaatatcttgtgattcagatcacaaagattcaacaaaccatcaaaacaaaaatgtgacactactcacatttaaatgccatttttagcgaaaatcgccgccttgttgcttttttacacaagcgttttgtgatgaacgtcacgtcaattacctctctaccccctatatttatgtgattgatatcacacaaaaggccgtcgactggacagttaaccgattcagtgccagatttcgcagtatctacaaggtccggctacctctgccgccacattaacaaaaaacctcgggcttccagcctgcgcgacagcaaacataagaaggggtgtttttatgagttccgatattaagatcaaagtgcaaagctttggtcgtttcctcagcaacatggtgatgccaaatatcggcgcgtttatcgcgtggggtatcatcaccgcgttatttattccaacagggtggttaccgaacgagacgctggcgaagctggtcgggccgatgatcacttatctcctgccgctgctgatcggttataccggtggtaagctggtaggcggcgaacgtggcggcgtagtcggtgccatcaccaccatgggcgttatcgtcggcgcagacatgccgatgttcctcggttctatgattgcaggtccgctgggcggctggtgcattaagcacttcgaccgctgggtagacggtaagatcaaatccggttttgagatgctggtgaataacttctccgcaggcatcatcgggatgatcctcgctattctggcattcctcggcattggcccgattgttgaagccctgtccaaaatgctggctgcgggcgttaacttcatggttgtccatgacatgctgccgctggcgtctatctttgttgaaccggcgaaaatcctgttcctcaacaacgccattaaccacggtatcttcagcccgctgggtattcagcagtcccatgaactgggtaaaagtatcttcttcctgattgaagctaacccaggtccaggtatgggcgtgctgctggcgtacatgttctttggtcgtggtagcgctaaacagtctgcgggcggtgcggcaatcatccacttcctggggggtatccacgaaatctacttcccgtatgtgctgatgaatccgcgtctgatcctcgcagtcatcctcggcggtatgactggcgtgttcacgctgactatcctgggcggtggtctggtttctccggcatctccgggttctatccttgctgtactggcgatgacaccaaaaggtgcttacttcgctaacatcgcgggtgtgtgtgcggcgatggctgtctccttcgttgtctctgctattttgctgaaaaccagcaaagtgaaagaagaagatgatattgaagcagcaactcgtcgtatgcaggacatgaaagctgagtctaaaggcgcatctccgctgtctgctggcgatgtgactaacgacctgagccacgtacgtaaaatcatcgttgcctgtgacgccggtatgggttccagtgcgatgggcgcaggcgttctgcgtaagaaaattcaggatgcaggtctgagccagatttctgttactaacagcgcgatcaacaacctgccgccagatgtggacctcgtcatcactcaccgtgacctgaccgaacgcgctatgcgccaggttccgcaggcacagcatattagcctgaccaacttcctcgacagcggcctgtacaccagcctgaccgaacgtctggttgctgcccaacgccacacggcaaacgaagagaaagtaaaagacagcctgaaagacagctttgacgattccagtgctaacctgttcaagctaggcgcggagaacatcttcctcggtcgcaaagcggcaaccaaagaagaagcgattcgttttgctggcgagcagctggtgaaaggcggttacgttgagccggaatacgttcaggcgatgctggatcgtgaaaaactgaccccgacttatctgggtgagtctatcgcggtgccacacggtacggttgaagcgaaagatcgcgtactgaaaacgggcgtcgtgttctgccagtacccggaaggcgtgcgcttcggtgaagaagaagatgacattgcccgtctggtgattggtattgctgcccgtaacaacgagcacattcaggttatcaccagcctgaccaatgcactggatgatgagtccgtcatcgagcgtctggcacacaccaccagcgtggatgaagtgctggaactgctggcaggtcgtaagtaatccaatcccaccctctccacatggagaaggtggggttaattgcctgatgcgctacgcttatcaggcctacaggatgcatcacaatttgttgaatttgcacgttcttgtaggccggataaggcgcttacgccgcatccggcgctgcccctctcctcacggagagggtttgggtgagggaaaagcctcaccccagccctctcgggtaaaaacattgatgaaggttaatactatgaaagcattacattttggcgcaggtaatatcggtcgtggctttatcggtaaactgctggcagacgcgggtatccaactgacgtttgccgatgtcaatcaggtggtacttgatgccctgaatgcccgtcatagctatcaggtacatgtggttggtgaaaccgagcaggtagataccgtttccggcgtcaatgctgtcagcagcattggtgatgatgtcgttgatctgattgctcaggttgatttagtcactaccgccgttggcccggttgtgctggaacgtattgctccggcaatcgccaaagggcaggtgaaacgtaaagaacaaggtaatgaatccccgctgaacatcatcgcctgtgaaaacatggtacgcggtaccacgcagctgaaaggccatgtgatgaacgccctgccggaagacgccaaagcgtgggtagaagaacacgttggctttgtcgattccgccgttgaccgcatcgtaccgcctagcgctagcgcaactaacgatccgctggaagtgacggtagaaaccttcagcgaatggattgtcgataaaacgcagttcaaaggcgcactgccgaacatcccaggcatggagttaaccgacaacctgatggcatttgtcgaacgtaaactcttcaccctgaacacgggtcatgctataaccgcgtacctcggaaaactggccggtcatcagaccattcgtgacgcgattctcgacgagaaaatccgcgcggtggtaaaaggtgcgatggaagaaagtggtgcagtattgatcaagcgctacggctttgacgctgacaagcatgcggcgtacatccagaaaattctcggccgttttgagaacccgtatctgaaagatgatgtagagcgcgtaggccgtcagccactgcgtaaactgagtgctggcgaccgtctgatcaagccactgctcggtacgctggaatatggtctgccacataaaaacctgattgaaggtattgccgctgcaatgcacttccgcagtgaagatgatccgcaggctcaggaactggcagcactgatcgctgacaaaggtccgcaggcggcgctggcacagatttccggtcttgatgccaacagcgaggttgtatccgaggcggtaaccgcttataaagcaatgcaataatggtggaccaggcgcaggacaccctgcgcccgaataacagattgagtgatatgcaggcaacaatggaacaaacccaggcctttgaaaaccgtgtgcttgagcgtctgaatgctggcaaaaccgtgcgaagctttctgatcaccgccgtcgagctcctgaccgaggcggtaaatcttctggtgcttcaggtattccgcaaagacgattacgcggtgaagtatgctgtagaaccgttactcgacggcgatggtccgctgggcgatctttctgtgcgtttaaaactcatttacgggttgggcgtcattaaccgccaggaatacgaagatgcggaactgctgatggcattgcgtgaagagctaaatcacgacggcaacgagtacgcctttaccgacgacgaaatccttggaccctttggtgaactgcactgcgtggcggcgttaccaccgccgccacagtttgaaccagcagactccagtttgtatgcaatgcaaattcagcgctatcaacaggctgtgcgaagtacaatggtccttagtctgactgagctgatttccaaaatcagcttaaaaaaagcctttcaaaagtaagcaacgtctgcttactgcccctctacctgcttcggccgataaagccgacgataatactccagacgttgtagatataacggcacgctttcatcgggtattccggacggaatcgcgttacggggaggaagttttttcagatactcccggaacgcctggctacttgccatgaaatctacggctttatcgataagaagcggaacgttttcacctaatttgcccatgatgatatctccgtattaccccgcgccgggaatgcgcggccgccaattttagtttaggttcccggtaaagatgacattaaggaaaacgtgctgaatcctcaataatcatccgctgctgtttattatcttttttctatagatttcttaattaatcaacgaattgcgcagtttttgagcatgttaatgattacgttacagaactattacaatgtcattagttgtgaacaaagcacctggtcgcgcatactaggggctataaatttatctttatcagaagccatcacatgaaagaagtcgaaaaaaacgaaatcaaacgcctcagcgatcgcctggacgccatccgccaccagcaggccgatcttagcctggttgaagccgcagacaaatatgccgagctggaaaaagagaaagccacgctggaagcagaaattgctcgcctgcgtgaagttcatagccaaaaactgagtaaagaagcacagaagctgatgaagatgccattccagcgcgcaattaccaaaaaagagcaggctgatatgggcaagctgaagaaaagtgttcgcggactggtcgttgtgcacccaatgaccgcactgggccgcgaaatgggcctgcaggagatgactgggtttagtaagaccgcgttttaagaacacagtatctacagggtgattctgcacattcctataggccgagtaaggtgttcacgccgcatccggcaagataaggcgctctggatcaacaacctaagggcaattctctgatgaggattgcccttttctttaccagacatctccccccacaagaattggccctaccaattcttcgcttatctgacctctggttcacaatttcccaattaaaactcacatcaatgttgccaatacataacatttagttaaccattcattgtcattatccctacacaacacaattggcagtgccacttttacacaacgtgtgacaaggagatgagcaacagactcattacacgatgtgcgtggactccaggagacctgcaatgaatctctggcaacaaaactacgatcccgccgggaatatctggctttccagtctgatagcaagccttcccatcctgtttttcttctttgcgctgattaagctcaaactgaaaggatacgtcgccgccagctggacggtggcaatcgcccttgccgtggctttgctgttctataaaatgccggtcgctaacgcgctggccagcgtggtttatggtttcttctacgggttgtggcccatcgcgtggatcattattgcagcggtgttcgtctataagatcagcgtgaaaaccgggcagtttgacatcattcgcagctctattcttagcataacccctgaccagcgtctgcaaatgctgatcgtcggtttctgtttcggcgcgttccttgaaggagccgcaggctttggcgcaccggtagcaattaccgccgcattgctggtcggcctgggttttaaaccgctgtacgccgccgggctgtgcctgattgttaacaccgcgccagtggcatttggtgcgatgggcattccaatcctggttgccggacaggtaacaggtatcgacagctttgagattggtcagatggtggggcggcagctaccgtttatgaccattatcgtgctgttctggatcatggcgattatggacggctggcgcggtatcaaagagacgtggcctgcggtcgtggttgcgggcggcagctttgccatcgctcagtaccttagctctaacttcattgggccggagctgccggacattatctctagcctggtaagtctgctctgcctgacgctgttcctcaaacgctggcagccagtgcgtgtattccgttttggtgatttgggggcgagtcaggttgatatgacgctggcccacaccggttacactgcgggtcaggtgttacgtgcctggacaccgttcctgttcctgacagctaccgtaacactgtggagtatcccgccgtttaaagccctgttcgcaagcggtggcgcgctgtatgagtgggtgatcaatattccggtgccgtacctcgataaactggttgcccgtatgccgccagtggtcagcgaggctacagcctatgccgccgtgtttaagtttgactggttctctgccaccggcaccgccattctgtttgctgcactgctcagcattgtctggctgaagatgaaaccgtctgacgctatcagcaccttcggcagcacgctgaaagaactggctctgcccatctactccatcggtatggtgctggcattcgcctttattagcaactattccggactgagtagtacactggcgctggcactggcgcacaccggtcatgcattcaccttcttcagcccgttcctcggctggctgggggtattcctgaccgggagcgataccagttctaacgccctgttcgccgcgctgcaagccaccgcagcacaacaaattggcgtctctgatctgttgctggttgccgccaataccaccggtggcgtcaccggtaagatgatctccccgcaatctatcgctatcgcctgtgcggcggtaggcctggtgggcaaagagtctgatttgttccgctttactgtcaaacacagcctgatcttcacctgtatagtgggcgtgatcaccacgcttcaggcttatgtcttaacgtggatgattccttaatgattgttttacccagacgcctgagtgacgaggttgccgatcgtgtgcgggcgctgattgatgaaaaaaacctggaagcgggcatgaagttgcccgctgagcgccaactggcgatgcaactcggcgtaagtcgtaatagtctgcgcgaggcgctggcaaaactggtgagtgaaggcgtgctgctcagtcgacgcggcggcgggacgtttattcgctggcgtcatgacacatggagcgagcaaaacatcgtccagccgctaaaaacactgatggccgatgatccggattacagtttcgatattctggaagcccgctacgccattgaagccagcaccgcatggcatgcggcaatgcgcgccacacctggcgacaaagaaaagattcagctttgctttgaagcaacgctaagtgaagacccggatatcgccagtcaagcggacgttcgttttcatctggcgattgccgaagccagtcataacatcgtgctgctgcaaaccatgcgcggtttcttcgatgtcctgcaatccagtgtgaagcatagccgtcagcggatgtatctggtgccaccggtttttagtcaactgaccgaacaacatcaggctgtcattgacgccatttttgccggtgatgctgacggggcgcgtaaagcaatgatggcgcaccttagttttgttcacaccaccatgaaacgattcgatgaagatcaggctcgccacgcacggattacccgcctgcccggtgagcataatgagcatagcagggagaaaaacgcatgattatttccgcagccagcgattatcgcgccgcagcgcaacgcattctgccgccgttcctgttccactatatggatggtggtgcatattctgaatacacgctgcgccgcaacgtggaagatttgagtgaagtggcgctgcgccagcgtattctgaaaaacatgtccgacttaagcctggaaacgacgctgtttaatgagaaattgagcatgccggtggcactggctccggtgggtttgtgtggcatgtatgcgcgtcgtggcgaagttcaggcagccaaagcggcggacgcgcatggtattccgtttactctcagcacggtttccgtttgcccgattgaagaagtcgcgccagccatcaagcgcccaatgtggttccagctttatgtactgcgcgatcgcggctttatgcgtaacgcgctggagcgagcaaaagcagcgggttgtagcacgctggttttcaccgtggatatgccgacaccgggcgcacgctaccgtgatgcgcatagtggtatgagcggcccgaacgcggcaatgcgccgctacttgcaagcggtgacacatccgcaatgggcgtgggatgtgggcctgaacggtcgtccacatgatttaggtaatatcagtgcttatctcggcaaaccgaccggactggaagattacatcggctggctggggaataacttcgatccgtccatcagttggaaagaccttgaatggatccgcgatttctgggatggcccgatggtgatcaaagggatcctcgatccggaagatgcgcgcgatgcagtacgttttggtgctgatggaattgtggtttctaaccacggtggccgccagctggacggtgtactctcttccgcccgtgcactgcctgctattgcagatgcggtgaaaggtgatatagccattctggcggatagcggaattcgtaacgggcttgatgtcgtgcgtatgattgcgctcggtgccgacaccgtactgctgggtcgtgctttcttgtatgcgctggcaacagcgggccaggcgggtgtagctaacctgctaaatctgatcgaaaaagagatgaaagtggcgatgacgctgactggcgcgaaaagcatcagcgaaattacgcaagatagcctggtgcaggggctgggtaaagagttgcctgcggcactggctcccatggcgaaagggaatgcggcataatcgtttgcgccccctcaccctaaccctctccctcagggagaggggaccgttcggcgctgtatgtactccctcactctgaaacgacaccgcactctttttttctccctcgcccctccggggagagggccggggtgaggggaaaaggccgcactgctcaccaattttctgctatcctgcccccgcactaagggggcagtatgctaaacatcgtactttacgaaccagaaattccgccaaatactggcaacatcatccgtctttgcgctaataccggctttcgtctgcatatcatcgaaccgatgggatttgcctgggacgataagcgcctgcgccgcgcggggctggactatcacgagtttaccgccgttacgcgtcatcatgactatcgcgcgttcctcgaagcagaaaatccccagcgcctgttcgccctcaccacgaaaggtacacctgctcacagcgccgtaagctatcaggatggcgattatctgatgttcggcccggaaacacgcggcctgccagcgagcattcttgatgccctgcccgctgaacaaaaaattcgcattccgatggtgccggacagccgcagcatgaatctgtccaatgcggtgagcgtagtggtgtatgaagcctggcggcagttggggtatccgggagcggtattgagagattaattactgtaggccggatagatgattacatcgcatccggcacgatcacaggacattagatcccatccccatactcaaatgtatggttaataccgttgaaatgctggtccatatccatacttggcttatcgctgtctggtttaccgacaatacgagccggaacgccagcggcggtggtatgcggcggcaccggttgcagcaccacggaacctgcgccaatcttcgcgccgcgcccaacttcaatattgccgaggattttcgcgcccgcgccaatcatcacaccttcacgaattttcgggtgacggtcaccaccagatttacccgtaccgccaagcgtcacagattgcagaatgcttacgtcgttttcaatcaccgccgtttcaccaacgacgatgcctgtcgcgtggtcaagcatgataccgcgaccaatttttgctgccgggtgaatatcgacctggaacgtcacagaaacctggttttgcagaaagattgccagtgcgcgacgcccctgattccacaaccagtgaccgatgcgataggcctgcaaggcatgaaaacccttcaggtataacaacggggtactgtatttatcgactgccgggtcgcgggtacgcaccgcctgaatatcacaggccgcagaggcgatcatttccgggtcagcggcgtaggcttcttccaccacttcacggatagcaatagcaggcataattgggctactcagcttgttcgccagcatgtagctcagtgcactgccaaggttttcgtgcttgagtagcgtcgcgtggtaaaaactggccagcattggctcacagtccgccagcgttctggcttcggctttaatattgttccagacaatttccagttcttcacagctcattgcttactccacacgatgagataatgaccggcccgttctgcgcgggccgggtcatagcggtaacaaaggttccctggggttagtggctgctgcgctcgtccttgcgtgcacgacctagtaaagtcaatgctgcctcgcgcgcgttttttccgcaatataatacttgataaatttcctcggttattggcatttcaacgccgaagcgatgcgccagttcgcggacttctttcgtattgcggtagccttccaccacctgaccaatcttctcctgcgcgctttgtacatccatgccctgaccgagcatcatgccaaaacggcggttacggctctggttgtcggtacaggtaagcaccagatcgccaagccccgccatgcccataaaggtggcagggtcggcacccagcgccgcaccaagacggctcatttcagccagcccacgggtgatcagcgccgtacgcgcattcgcaccaaaaccgataccgtcggacatccccgcaccaatggcaataacgtttttcaccgcgccgccaagctgcacgccaatgaaatccggattgctgtaaacgcggaaacttttgccgcagtgcagcagctgctggagatcatcggcaaaggtctgatcggtgctggccaggctaatagctgtcggtaaacctgccgccagttctttcgcaaacgttgggccagagataaccgccagcggaatttgatcgcctaaggcctcacgcgccacgtcctgtaacagacgtccggtttccgcttccagccctttggtcgcccacaccagacgcgcatcaggacgcatcagtggtttaatctggcgcagcacttcaccaaagacatggctgggtacgacgacgagaatattacggctggctgccagcgcagtggcgagatcgctttcaagatggagcgtatcgggaaaaggcacatcggggagaaacgcggcgttacagcggtcgcgttcaagcgttgcgatatgttcagggtcatggccccagaggacaacctcgtggccatttcttgccagggtgatggcaagagcggtgccgtagctgccggcaccgatcacagtcatactagcattacgttggttcatcaggcatcctgatgttcttcagtaccttcgccagcctgctgctgcaaatagttcatgaacagcgcatcgaagttaaccggcgcaaggttcagttgcgggaatgtaccgcgggataccatgctggtgatgcactcacgagcatacgggaacagaatgttcgggcagtatgctcccaggcaatgcgccatctgggtgccttcgatacccgcgatggagaaaataccgccctgctgaacttcacacaggaacgcggtttcttcgcccaaagaggccgttacggtaacacgcagtaccacttcgtatacgtcatctgccagttgggaagatgccgtatccagatcaagtttaacttctggttgccaatctttctggaaaacgtgcggcgcgttcggcgcttcgaaagagatatccttggtataaatacgttggatctggaaagtcatttcagtgttgttttgttcactcatgtgtagaaaacccttaagtgttgtccttaaatactgcgcaatgtaatgccaacgttcacacgttatttcagcaggggatccagtccaccacgtgcatccaatgcatacaagtcatcacagccgccaatgtgctgtgcgtcaataaaaatctggggaaccgtggtgcgaccgctgcgtttgatcatctcttcacgcttggcggcgttgccatcgatcggcagctcctggaaactcacgcccttgctgctcagcagtgcttttgcacgatggcaatacgggcaggtttctttggtatagatttcaacattggccataaattagctcctgtttttttaccctgaaatttcatgttgcagggcggcagcaaaatggagtgtccccagaagcttataacaataagtcgctgggggcctaattgcagctaacggcctgcatcatgaaagacgacaggtaaattatttgccgcgcaccaaaggcaagttttcgccagcccagccagcgacgccttctttcagcacgaatacttgcgcaaaaccagctttcgtcagtgcgtttgcaggctcctggcactgcatgccagaaccgtctaccacgataaccggtttgtctttgtgcttctcaagctcaccaacattgttggctttgatttcgctcggcaacagattaatagaacctgcgatatggcctttacggaagtcatcacgctgacgtaaatccacaaccacagcgtcttctttgttgatcagacgcgtagcttcaccacgagtaatcaccttcactttgctggtcaggctcttaaacgtagtcacaagaaccgccaccagtaacgcgatccaggcgatactcagtatgggatgacggccaacaaattgcataatttcttgcatggggggtaacaactcccgacgtagtgattaaaaaaaccaggaaaggagtatacctgcgcggtgcggcaaatacagccagcgcgttaactggaatgcaattttgcggggcgcgacgaaaaaaaagcgtaaatctggcatcggcttgccgcgagcggtcgtatattttgatcttcagaggctattttatcgattcagctgtagtaaaattacgcaaattttgactcttgagtatgaggttgtcgcaatgttggtttctaaaaaacctatggtactggtgattctggatggctatggctatcgcgaagaacagcaggataacgccatttttagtgctaaaaccccggtaatggatgcactgtgggccaatcgtccgcataccctaatcgacgcttccggtctggaagtcggtctgcctgaccgtcagatgggtaactccgaagtaggccacgttaacctgggtgccggccgcatcgtgtatcaggacctgactcgtctggacgttgaaatcaaagatcgcgctttctttgctaatccggtgctgactggcgcggtagataaagcgaaaaacgcaggcaaagcggtacacattatgggtctgctctccgcaggcggcgtacacagccacgaagatcacatcatggcgatggtagaactggcagctgaacgcggcgcagaaaaaatctacctgcacgcattccttgacggtcgcgacactccgccgcgcagtgctgaatccagcctgaaaaaattcgaagaaaaatttgccgcgctgggcaaaggccgcgtagcgtccatcattggtcgttactacgcgatggaccgcgataaccgttgggatcgcgtagaaaaagcttatgacctgctgactctggcgcagggcgagttccaggccgataccgccgttgctggtttgcaggctgcttatgctcgcgacgaaaatgatgaattcgtgaaagcgaccgttatccgtgctgaaggtcagccagacgcggcaatggaagacggcgatgcactgattttcatgaacttccgtgctgaccgcgcgcgtgaaatcactcgtgctttcgtgaacgctgatttcgatggcttcgcgcgtaagaaagtggttaacgtcgatttcgtgatgctgaccgaatacgccgctgacatcaaaactgcggttgcttacccacccgcttccctggttaacaccttcggcgagtggatggcgaaaaacgacaaaactcagttgcgtatttccgaaaccgaaaaatatgcccacgttactttcttcttcaacggtggcgtagaagagagcttcaaaggcgaagatcgcattctgatcaacagtccgaaagtggctacctacgatctgcaaccggaaatgagctccgcagagctgaccgaaaaactggttgcggccatcaagagcggcaaatacgacaccatcatctgtaactatccgaacggcgacatggtaggtcacaccggggtgatggaagcggcggttaaagcggttgaagcgctggatcactgcgtggaagaagtcgcgaaagcggttgagtccgtgggtggacaactgctgatcaccgctgaccacggtaacgctgagcagatgcgcgatccggcaacgggtcaggcacacacggcacacaccaacctgccagttccgctgatttacgttggtgataagaacgtgaaagcggttgaaggcggcaaactttctgacatcgcgccgaccatgttgagcctgatgggtatggaaatcccgcaagagatgactggtaagccgctgttcatcgtggaataatccctccccatgaggggaaaggcgattaataccatgacacgggccgtgaaaccgcgcaggtttgcaatcaggcccatcatctacgccagcgttcttagcgctggcgtattgttgtgcgccttttccgcccacgcggatgagcgtgaccaactcaaatctattcaggctgacatcgccgcaaaagagcgcgcggtacgccaaaagcaacaacaacgcgcaagcctgctcgcacaattgaaaaagcaggaagaagcgatctctgaagccacccgtaagctgcgcgaaacgcaaaacacgctcaatcaactcaataaacagattgatgagatgaacgcgagcattgccaaactggagcagcaaaaagccgcccaggagcgcagcctcgccgcacaactggatgccgcattccgtcagggcgagcataccggtattcagctgattctcagcggtgaagaaagccagcgtggacagcgtttacaggcttatttcggctatctcaaccaggcgcgacaagaaaccattgcccagttgaagcaaacgcgtgaagaagtcgccatgcagcgtgctgaactggaagagaaacagagcgagcaacaaacgctgttatatgagcagcgcgcccaacaggcgaaactgactcaggcgctgaacgagcgtaaaaagacgctggcagggctggagtcttccatccagcaaggtcagcaacagttgagcgagctgcgcgccaacgaatcccgtctgcgtaacagcattgcccgtgcggaagccgcggcgaaagcgcgtgcagaacgagaagcacgtgaggcccaggcggttcgcgaccgccagaaagaagcgacgcgcaaaggcaccacctacaaaccgaccgaaagcgaaaaaagcctgatgtcccgtaccggtggtctgggcgcgccgcgtggtcaggcattctggccggttcgcgggccgacgctgcatcgctatggcgaacagctacagggtgaattacgctggaaaggtatggttatcggtgcttctgaaggtactgaagttaaagcgattgccgacggtcgggtgattctggctgactggctgcaaggctacggtctggtggtggtggttgagcatggtaaaggcgacatgagtctttacggctataatcagagcgcactggtgagcgttggtagccaggttcgcgcgggccagccgattgcactggtgggcagcagtggcggtcagggtcggcctagtctctatttcgaaattcgccgccagggtcaggcggtcaatccacagccgtggttgggaagataagttttgtttccatttcgtcgtaacgttcttgcatttgccgctctgttggcgctctcctcccccgtacttgctggcaaacttgccatcgtcattgatgattttgggtatcgcccgcacaacgaaaaccaggtgctggcgatgccttccgctatctccgtcgctgtattacccgatagtccgcacgccagagagatggcgaccaaagcgcataacagcgggcacgaagtgttgattcatctcccgatggcaccgttgagtaaacagccgctggagaaaaatacgctacgcccggagatgagcagcgacgaaattgagcgcattattcgtagtgcggtcaataacgtgccctatgccgtggggatcaacaaccacatgggcagcaagatgacctctaacctgtttggtatgcagaaagtgatgcaggcgctggagcgttacaatctttacttcctcgacagcgtaaccatcggtaatacccaggcgatgcgcgccgcgcaaggcactggcgtgaaggtgatcaaacggaaggtattcctcgacgatagccaaaatgaagcggacatccgtgtgcaatttaatcgcgcaattgacctggcgcgtcgcaacggtagcaccattgccattgggcatcctcaccctgcaacggtacgcgtgttgcaacagatggtttataacctgccgccagacattacgctggtgaaagccagcagcttgctgaatgaaccgcaggttgatacttctacaccgccgaaaaacgctgtgcctgatgcaccgcgtaatccgttccgtggcgtgaagctgtgcaaaccgaagaaaccgatagaacctgtttatgctaatcgcttctttgaagtattaagcgaaagcatcagccagagcacgctgatcgtttacttccagcatcagtggcaaggctggggcaaacagcccgaagcggcgaagtttaacgctagcgcaaattaattagcgcaaattaaaggcgctacgcgtaatgcgatggtggctccgcgttttgtcgcgccattgccataagcggaaagaccacagtaacgcctggtaaccgaccttcacgctgcgcacattggtaatcaggcgcttatacataccggaagtaaatatctcggcaatcatccgttggcgggtaagaatatccggctctttgcgcaccgcatggcaaacacgcaatgcctcgtaagttatttgctgatgaaattccggataaatcataattttgtcggcataatttcgatttaatttctccagcaggcgggtaatcttaatatagtgacgttgataattaaggtttttattcccttgtctatgcaaccgactcacactcgtattatgcagataatatttatataaactttgctcggtatatcgcgcacgcagcgcgttaaacatgaattctgttgtccagacaatatcctgatgatgtaatccggcaataaatttaatgttatttttaacaataacatcacggcgataaacccccatccagacaacgtgagtccaacggcggctagaaagccccatccgcagccagtccgggccggttaatacgccggtactgcgaaggcgatcggtggggatggattgccaggtttctcccgtttcacgaaaacaccagtcagcgttgcactgcgccacgtcgaggtcgtcctctaacgccatggtcatcagcgtttcgtacatggtgggatagacttcatcgtcagcatcgacaaaagcgacatatttgcccgttgccacttcaatcccacgattacgcgccacgcttgcgccagcattcgcctgatgcaacaaacgaacgtgcggatagttttctgcgtaatactttgctatttcaacagaattatccgtactaccatcgttaataataatgatttccagagcagtccaggtttgcgtaattaaagattccatacaagtgcggaaatcatcgcccgcattatataacggaataataacactaagtttattggtgctgttcatcataaattaccgacgacctctgaagttatcctgacgttttacaggctttgtattaagaaactattaagcctgtgagatattatttttacaggtgagagagtcacttcagggtagagagataatgagagcagctatataagagatcagcacaattacgaactctttattacactgacaggattttacatatttaacagattatcctcagataaaagggctggaataccagcccttgttcgtgttaatcccagctcagaataactttcccggactggccgctacgcatagcgtcaaagcccttctggaaatcatcgatagagaaacgatgggtaatgatcgggctaagatcgaggccagactgaatcagcgccgccatcttgtaccaggtttcaaacatctcacgaccgtaaatacctttaatgaacaagcctttaaagatcactttggtccagtcgatagacatatcagacggcggaatacccagcatcgcaatacggccgccgtgattcatggtgtcaagcatggtacgaaacgctggcggcgcaccggacatttccagaccgacatcaaaaccttcggtcatgcctaactccgccatcacgtcattgagattttctttggcgacgttaaccgcacgggtgatacccattttacgcgccagctcaaggcggtattcgttaacatcagtgatcaccacattgcgtgcaccaacgtgtttcgccaccgccgctgccataataccaatcgggcctgcaccagaaaccagcacatcttcgcccaccagatcaaagctcagcgcggtatgcacggcgttaccgaagggatcaaaaattgcggctaagtcatcggaaatattgtcggggattttgaaggcgttgaatgccgggatcaccagatattcggcaaagcagcccgggcgattaacaccaacgcctatcgtgttgcggcacaaatgggtacgaccaccacgacagttgcggcaatgaccacaggtgatatggccttcgccagaaacgcgatcgccgatcttgaagcctttcacttcctgaccaatacctaccacttcaccgacatattcatggcccacgaccatcggcaccgggatggttttttggctccactcatcccagttatagatgtgaacgtcagtcccgcagatggctgttttacggattttaatcagcagatcgttatgcccgagttccggtacaggaacgtcggtcatccagatgccctcttccgctttcagtttggataacgctttcatctcacatcctcaggcgataacgcccagttgtttaccaatacgcgtaaatgcttctactgcacgcgtaatttgctcaggggtatgcgccgcagacatctgggtacgaatacgcgcctgacctttcggaacgaccggatagaagaaaccggtaacgtaaatgccctctttttgcagctcacgggcaaatttctgcgccactaccgcatcaccaagcatgaccggaataatggcgtgatcggctcccgccagggtaaagcccgccgcgctcatttgctcacggaactgacgcgcgttcgcccacagacggtcacgcagttcgctgcccgcttcgaccatctccagtactttgatggacgcggcaacaatggccggtgccaggctgttggagaacaggtacggacgagaacgctggcgcagccactcaaccacttctttgcgcgccgcggtataaccaccagaagccccgcccagcgctttaccaagcgtaccggtgataatatcgacccggcccatcacatcgcagtattcatgggaaccacgaccattttcaccgacaaaaccgaccgcgtgggagtcgtctaccatcaccagggcatcatatttatctgccagatcgcaaacgcccttcaggttggcaatcacgccgtccatactgaacacaccatcggtggcgatcagcacatgacgcgcaccggcttcacgcgcttctttcagacgtgcttccagctcctgcatatcgttgttggcatagcgatagcgtttagctttgcacagacgcacaccatcaataatagacgcgtggttcagtgcgtcggagataatggcgtcttccgcacccagaagcgtttcaaacaggccaccgttagcatcaaagcaggaagagtagagaatcgcatcttccatccccaggaaggccgccagtttttgttcaagctctttatggctgtcctgagtgccgcaaataaaacgcacgctagccatgccgaaaccgtgagaatccattcccgcctttgccgccgcaatcagatcaggatgattcgccagcccgagatagttgttggcacaaaagttaatgacgtggcttccatcagccacagtgatatctgcttgctgcgcagacgtaataatgcgctcttctttaaacaacccttccgcccgtgcggtttccagatcgttggttaactgctgataaaattctccacgcattgcgattctccagacagggcaaattccagcacatattacccaaacttataggtcgcgacgagataacgcgttaacacttctgcaaaattcaggataaataacgtgtaacttgatgtctctcaacacctacagatagtagaaaaactgtacagttttggctgggcataatgatgattgattttactgcattgatataaaaagaaaaaatgatgccaaagcatcatttttcctatctcagttggtatcaaaacgctacccactaatggagggaaacttattttctactaaggaaaattctcagcgcctgcatttttgcccctaaagtgttactcctgaagcagcgaaacaaatcgaaccattttcctctccccagatagtttaggttgaagagatcggggcgtttgtaatagcacatgacaaaaatgccctggtcatcgtccacaatgttattatttagtgttattttttgactttccagaactaatttatagaattctttccatttatgctgactaccaacaattgcgcccccaataatatatacatgattgccaatcatgaaatcaaaaacctgttgttgagatgtgacagtaagccctttttttatagtgaaaagatgcatcttactttcatcaaatgggaaatcccaaattttcaatcctcgagttacatttggcttatggcaatagccaaaatctatccacgcaacaagaggcgttttcactaagcccatgttgatagctttatttacaaaataggccttaaggttacataccaaaacatactctggactccagtactctgggttttttaattgtcgaggctcaagtctatttgtaaagctctcatctttttgaattttttcgatacgacttctgatatatctaaatttcttttttatatcgataacgataaccgttgttggttttccgttgcgaatcgcttcaacccttggtttcaaatcgggagaagtgaaaataatcatctcattttcaagtgcggccagacgctcaaagtaactaaaataaacatcaacactacgagctagtttttcacggaaccctttattagcagtccaatcccctctaccaatgtcaaaatatgcagtgataattgtggtggaacttttcattactaataagaccattaatataaaaaaagaattatatcataaatattaatagaatgtatactgtatattatccattcaaatgcttccgttatttatcatacatcggaatattgatactaaagcactattcacatgcaaaaccaacatccgccatgaaggactagctaaaacccaaactagtttgttgcaattagcatccttgcacctctatgtaaagggctgaagggattcggatgtgatggtatgattacagacattcgtgtctgagattgtctctgactccataattcgaaggttacagttatgatcatcgttaccggcggcgcgggctttatcggcagcaacatcgttaaagccctgaatgataaaggcatcaccgatattctggtggtggacaacctgaaagacggcaccaagtttgtgaacctggtggatctgaatatcgcagactatatggataaggaagacttcctgatccagattatggctggcgaagagttcggcgatgtcgaagcgattttccacgaaggcgcgtgctcttccaccaccgagtgggacggcaagtatatgatggataacaactatcaatactccaaggagctgctgcactactgcctggagcgtgaaatcccgttcctgtacgcttcttccgcagccacctacggcggacgcacctccgactttattgaatcccgcgagtacgaaaaaccgttgaacgtctacggttacagtaaattcctgtttgatgaatatgttcgtcaaatcctgcctgaagcgaacagccagattgttggcttccgttatttcaacgtttatggaccgcgtgaaggccataaaggcagcatggcgagcgtcgctttccatctcaacacccagcttaacaacggtgaaagtccgaagctgtttgaaggtagcgagaacttcaaacgcgacttcgtctatgtgggcgacgtggctgatgtgaatctgtggttcctggaaaatggcgtttccggcatcttcaatctcggtactggtcgtgcggaatccttccaggcggtagctgatgctacgctggcttatcacaagaaaggccagatcgaatacattccgttcccggataaactgaaaggccgctatcaggcgttcactcaggcagatctgacaaatctgcgcgcggcgggttacgacaaaccgttcaaaaccgttgctgaaggtgtaacggaatacatggcctggctgaatcgcgacgcataagagctctgcatgaaaatactggtgatcggcccgtcttgggttggcgacatgatgatgagccaaagtctctatcgcacgctccaggcgcgctatccccaggcgataatcgatgtgatggcaccggcatggtgccgtccattattaagccggatgccggaagttaacgaagctattcctatgcctctcggtcacggagcgctggaaatcggcgaacgccgcaaactgggtcatagcctgcgtgaaaagcgctacgaccgcgcctacgtcttacccaactccttcaaatctgcattagtgcctttcttcgcgggtattcctcatcgcaccggctggcgcggcgagatgcgctacggtttactcaacgatgtacgcgtgctcgataaagaagcctggccgctaatggtggaacgctatatagcgctggcctatgacaaaggcattatgcgcacagcacaagatctgccgcagccattgttatggccgcagttgcaggtgagcgaaggtgaaaaaagttatacctgtaatcaatttagccttagtagtgaacgtccgatgattggtttttgcccgggtgcggagtttggtccggcaaaacgctggccacactaccactatgcggagctggcaaagcagctgattgatgaaggttatcaggtggttctgtttggcagcgcgaaagatcatgaagcgggcaatgagattcttgccgctttgaataccgagcagcaggcatggtgtcggaacctggcgggggaaacacagcttgatcaagcggttatcctgattgcagcctgtaaagccattgtcactaacgattctggcctgatgcatgttgcggcggcgctcaatcgtccgctggttgccctgtatggtccgagtagcccggacttcacaccgccgctatcccataaagcgcgcgtgatccgtttgattaccggctatcacaaagtgcgtaaaggtgacgctgcggagggttatcaccagagcttaatcgacattactccccagcgcgtactggaagaactcaacgcgctattgttacaagaggaagcctgacggatgcgggttttgatcgttaaaacaagcagcatgggcgatgttctccatacgttgcccgcactcactgatgcccagcaggcaatcccagggattaagtttgactgggtggtggaagaagggttcgcacagattccttcctggcacgctgccgttgagcgagttattcctgtggcaatacgtcgctggcgtaaagcctggttcagcgcccccataaaagcggaacgcaaagcgtttcgtgaagcgctacaagcagagaactatgacgcagttatcgacgctcaggggctggtaaaaagcgcggcgctggtgacgcgtctggcgcatggcgtaaagcatggcatggactggcaaaccgctcgcgaacctttagccagcctgttttacaatcgtaagcatcatattgcaaaacagcagcacgccgtagaacgcacccgcgaactgtttgccaaaagtttgggctatagcaaaccgcaaacccagggcgattatgctatcgcacagcattttctgacgaacctgcctacagatgctggcgaatatgccgtatttcttcatgcgacgacccgtgatgataaacactggccggaagaacactggcgagaattgattggtttactggctgatagtggaatacggattaaacttccgtggggcgcgccgcatgaggaagaacgggcgaaacgactggcggaaggatttgcttatgttgaagtattgccgaagatgagtctggaaggcgttgcccgcgtgctggccggggctaaatttgtagtgagcgtggatacggggttaagccatttaacggcggcactggatagacccaatatcacggtttatggaccaaccgatccgggattaattggtgggtatgggaagaatcagatggtatgtagggctccaagagaaaatttaattaacctcaacagtcaagcagttttggaaaagttaagtagtttataaaggtaaaacatgctaacatcctttaaacttcatagtttgaaaccttacactctgaaaagtagtatgattttagagataataacttatatattatgtttttttagtatgataattgcattcgtcgataatactttcagcataaaaatatataatatcactgctatagtttgcttattgagtctaattttacgtggcagacaagaaaattataatataaaaaaccttattcttcccctttctatatttttaataggcttgcttgatttaatttggtattctgcgtttaaagtagataatagcccatttcgtgctacttaccatagttatttaaatactgccaaaatatttatatttggttcttttattgttttcttgacactaactagccagctaaaaagtaaaaaagagagtgtattatacactttgtattctctgagttttctaattgctggatatgcaatgtatattaatagcattcatgaaaatgaccgcatttcttttggtgtaggaacggcaacaggagcagcatatagtacaatgctaatagggatagttagtggcgttgcgattctttatactaagaaaaatcatccttttttatttttattaaatagttgcgcggtactttatgttctggcgctaacacaaaccagagcaaccctactcctgttccctataatttgtgttgctgcattaatagcttattataataaaagtcccaagaaattcacttcctctattgttctactaattgctatattagctagcattgttattatatttaataaaccaatacagaatcgctataatgaagcattaaatgacttaaacagttataccaatgctaatagtgttacttccctaggtgcaagactggcaatgtacgaaattggtttaaatatattcataaagagtccttttagttttagaagtgcagagagtcgcgctgaaagtatgaatttgttagttgcagaacacaataggctaagaggggcattggagttttctaacgtacatctacataatgagataattgaagcagggagtctgaaaggtctgatgggaattttttccacacttttcctctattttagtctattttatatagcatataaaaaacgagctttgggtttgttgatattaacgcttggcattgtggggattggactcagtgatgtgatcatatgggcacgcagcattccaattatcattatatccgctatagtcctcttactcgtcattaataatcgtaacaatacaattaattaagaataaacaagtttaagaagtgagttaaaactcacttcttatctatacaacttaatctctttacactattagttaaagtttcagtatcgatatcttttaccgtatatgttggggatactatttgtatagatttatgatgattcggggaccaaattaaatggctgggatattccggagtacgactattagggtaaaatgcaagcgttggtttatgataagccgcagcgatatgaacaagagctgtatcaacagaaatgacaaaatcactatacttggtcaacgcaacggtataaataaactcatcaaatggtagtgtttcgatttcaagtattggtattgtcaataaatcttgcggtaacccggtaaatataatccgataattttcaaagtgtgttttcacttcttgatatataacttttatttgctcaaacgtaagacggcatattttttttgcacctaatggattaataatgactattcttgtatctccaataaattcttttattttatcttcaacatctactggtaaatgcaagtcgtagttggtggaaaatttaccctcaccataaatatgcttcagtatttctattgctcgtgtactcatatgttcttttaaacattcatcgtggggatggtaaaaactatagtaacgcttataccaatgatcaaaacccagaatgtaagaatcttttaaactacttaatattaagctatgcttaaaactgggcatagtttcaaaggggtctaatacaatatcgaactgtaaatcccgcagatgcttacatagagtaagcatttcaagaaaaccggtactttctttaatacagaactcaaatatatttttattattagagagaaattccccaccctttctatttgtgagaagagttattttaacccctttactataaagttcacgataaatgctacttaatacaattagatcaccaagtttattattatcatgaataataaggcaacttttaacttgtgctggatctgtaatttgattatttattttattacgaaataaaaaagaaaggaaattaatcttgattttgtttatataaaatcttttctttttgtgaaaagttcctaagcgcatttttataccatattattttagtttcaggatgattaattagcataagaatcggtactagttctatattgcattttttttcttgtcatatctttactttcttctgcactgatgtcttgaagtttaataaatggaattacatcgtaagaaatagctgtatcatcacttaaattataaatattaatatcttttacattatcatgcataaaacgaaaaaatggcaatattttgaataaatccctacttaattcgctgggcatgggatttttattctcatcatagaaacgagaacagctacccgttaaatcaagaccagaacaaataatccgcgcatacttaagactatatgcgatttgaattgcagcaaaggcaatagtatggcaactgcaataaccaagactaatgtccttgcaaaatccaaccagacgaccttttttagacaacggtacagagatcagcagttctttgtgaatctgtctcaaaatattaaatttaatcttctttataaaaccacctttttcccgacggtaaaaggaccgtaatacgaggcagttctggaggatataaagtttatcttctttggaagcgtgttcataaacgtcaacgtttactatggtataacgacttctctggctaaatttataaaaatcatcacgacgctgatgtaaaaatcggacatctgtaagtacatatataaaaggaacgatattattacttaacagatattgcgcagaaccattgacagcaataatatcctttgttcgtaatacactcaaaggtgttttttggcttgtagggccgctaagaaaaataataacatcatcagatattttattttcaatcaggttttcaacatcttttttgtcaatgtatctaatattcttcatgataaacctgtgaaataaataactccgcttaaaactgtcctggtgaagacatgtaattgtgggattttttttagcgcgctggtttccctttcaaacgccgcataaaattgcgcatttttttacgatatactaaaagataatagcctagatctctaatctcatttttaataccgtaatgacgctctaagtcaatacgatctttcgctttacgctgcgcactagcacgctttccggagagatcgataattcgaacctcaccattttttataatgaagttaccacgatgggggtcgccagaaaccatgccatgttgatgtaaggcattaatactttgctgaattttattttttagcgcatcatcaatatcgggcatatcacacaactctatgccatcaatatactcgatgatcatgatataagtatggacaaaacgtaaggttttccgttcagccaataaataaaagtcattgagtgtatttaacccttcatttcgtactttttgggtttgctcaaaaaggcgttcgtaataatcaccttttaacagagacttaaagaaacgttcgttacgcttaactttcggagaaaaaaccttaagaatcaatttaccgtaatcggtatcaataagcataacttttgtatcatcaatagaacgaaaaaccttgatgatatttatattataagacaagaagtcatttaatacattgaggtacttactattgttttcatcggtaaaaacaaccaagtctttgatcttgctcttctgaatcataataaaccagttaaatgttatttacggtaatattttcggcaaagataacagactcctgctataattcctgagatataatgatgttgcactaaaagatgtttatatcttttttaaattcaataattgatttcgcatctcgtggagagtcatctttccagggggaattttctaaagctattttatagtattttaccgatggataaattgcccatttgtgccacggtttagttgcacctgtataatgaataagaagagtactttctgtaatcagctttttatagttttgatgtgttttgtcttttaattcacttttaattgtataaattgtattgtactcacgaggcaaaaataatgtcatccctttcagtaagacattcataacatcctgatcagggtatttataaacattatctttactcataagaatagacaacgctttttctgttagttttgcgtcagcccatttttttaagtctaaataaacgacaccggaattaaagtactgcccaagtaattcaggatcagacaacctggataccgccttttcttgcattggctcaacatctttaacaacagcagcaaccgctccatttaaacccagatgtaatagttggctaatatcgcctttacaaacaacatctgcatcaagataaagcaaacgatcaagcgttaaacccaataattgaaatgcaaataaacggaagtacattgctcttgaccagacctgtgtacaaggcaagcactggagcttatcagtgttaattctatataacgtgattcttaattggttttgctctgcaagctttgcaattttttgaaaaaaaccatcattataaacatcagcaataatataaaaatcaagattaatatgtcgattatttaggacaattgatgtgatggaaacacctacaccatcaagataattagcatcgacaccataggcaacatttaaacattcagaagtatttatattagctagccgaaaatcccaggctttaactttatctatctctatggcaggaaatgagtccacaatgctacccttatatcattactttatagtttcccagttttaatgctttatcttttcaataaaataaaaaagatagttgctaaatccttttagatatctatgctttttaagcatatgttttgcgctatatcttaattgattgctattgttcggtttcagcaacgccgtattcttccatgggctagcattttttgcctccataaaggcttgacttacaggataatcccaggcccaatcatgccagggcttggttggcccgatataatggataaaaatagtatcgttggttactgggtttataaagctttctttgagttgataatttaagctgaactgggtgttatatttaatatcagcgaaaataagtttatccgccagcaacatatttaacacatcctgatcaggatgtgttatttttttgattatttctggctcatttagcattgcaatagctcgtgcagaaacctgctgagccgcccattgggcagtattaatcaataaaaaaccggagttaaagtaacctttagcaattcccgcaacacctaagctatgggcgcgtttttcccaccagtcagcttgcccttctgtaacaaccattgcgactttatcgtcaggaaaactgaaattaattagtggctcaatagtcccctgacaaatgatatctgcatccagataaaggactttaggcgccttattaataaagtaatctgcaataacaaaacgaaaatatattgcatgagtccaattcttagtgctaggcaaactgcgcagtcgatcaccattaatcagatatattttaattctggttttatactgcaacgccagggcatcaaaatacttacgatcatcatcaccaaaataatcagtaaaaatatggaaacacaatcgacttccttcattatattttaatatactagcaatgctaattccgcaaccaaatagaaagtttttgtcagttccataagcgatgtccagacaaagattttctgtttctactttatgatcataatcaataacactattaagaaactcagtttcctggaaaaacacctgctgcattatttcctccgggaaatagcagaaataattaccttatgtaatctatcgtaatacttgctttggtaaaattcatcgatgctcgcaggaattttttcatgttcgatatgaatttcacctgctatatatttatttagaagagttacaaaaccagcaatatctcccggttgatacagatggccattgacatcaggttgaataatgtcagcaggcccggagacacaatcggcactgatacaaggaatcccccagctcaaggcttcaagtagggtcattgggaaaccttcaaaagaactcgtgagcaataacgcactcactttttcaatatcttgctggaccaattcccagggatattgttgccaaccataccagacaattcgatcatcaatatttaattctctaccataagcctggcatttttcgaaatcggagccatcacccaatacatggagtttccagttacctttcgcttgacttaagccatcaagcaggtctttaactcttttctggccttcaaatttcatacgcccaacataaataaacgttgccgtttcaccttcctcgggcgcgggaatgacactgtctttagtttcgacgggattaaaaataacatttatcgtgctttctgctacacctcgattaatcatttgctgtttaatgccagagctgattgctaaatgatagtcggcacaggtgatatattcagcatgttttttgtgatctaaagaaaaatgtggccaactaaatactggcatatcaattccactttttttacgtgcttttgcggcaaacaggcaggagatcacatcaatacaaataacgatatctggttggtactcctgaagccatttacttagagcatgaatatgtttcgcccgacgcaaaaaacctaaacgaatattggaaaaactacaactgtatttaataccttccagccatcccttatccattttgtcattacgacaaaagaaaaacatttcactttggatatgttgttgcctgaaggtagtaataacatcacggatgacagtttccatgccgccaaatccagaaacagcttcgccgataaacgctattttcatagaaactctcattaattgagtaaaactcactgttttaacggttttatttgtctataaaatcagaaacaatcgtactcatcattttatctggactgaatttatataaactatcataatccattggtttaacagaactgttaataaaatactctaacttatcccaatcatcatgacctattataaaaaagcgagattcactatagatttcactaccaaatacatttatattattagtaattaattttttattgaaaaatagtgcctcaagtatacgaagagtccagccagattggttttctttggttatatcaacaattatattagcatttaatgttcttctaatattctcttcataagatatttgtttttcaatcaaatacttactagtcgtagaacttgtcttatctttgacaacattaaaatctagcttacatcctagtgttgttaatctctcggctaactcattaattatttgaagacgccctttatcacgaccaaggaaaaaacatattggctggctgttatttttgtcagataaactataatttctaatttcatccattcctataggaaaaaattgttctattgccttgatcttttcattccctataaatctatgctcaaaatcatatataatatcgaaataattcgcgttatcaagaataaaatcttcgccaacagtatttcttagaagcaaaactttatgacagttaatattttttaatatttgtttattgatacctttattaacaacactgtcattaatgataattatgtcatcttttttaatatcattgaggtaatgcttgatgaataatcgccccagccatgcattatccatccctattttacttatttttttattaatccagttatatttttttggtgttgttatattttttatcttgtacttttttttcaggtactgaatcatttttaattcataatctgcaacccaatttataaaataaatagtcataataaagttagttccagtacatactaataaatatttttataatcctttgcgttgtgttcgctctttaatacgctcggccttaacgcttgccatgttcaataaattctgttcaagagacaatattttgcgtaaaggcatcccaaaataaaccttcataaatcgccagatatctctttgcgtcaggccaatattcatactactgaaatataaaccaatcaggtctttatcgcgccagcggcgcggtacttttgcacgtatctgtgcccgatgcagatcgataacactaatttttaattcatcttcccggccagtaaatggcaaatgaagcaaaaagtggcaaatgtaacagtcgcggtgatttatccctgcagtatgcattttacgcaccatagttgctacacgtgcgatcagcatacgcttaacacgtatatcaggcgggttgactgcccaatcggcacaataatcttcaaggctaattgtgggagtgagatcttcggtaataataaaacttgcgcgagttaatggatttaaccctttttcgccaaacccaatgcccttcattgtatcaacgccaacatcactcaggcgatgaatagcgtgccactctctgtctgcgcccaaaacgggcatccgcaaactgagtagattttttataatctcttttaatgtcgtccccttgtgccatttaagaaaatagcttttcccggacagttcaaagcgtaatgtacgacgagtctccagttcacgaaagacctcgccgttcagttttttgacctctgcaaaagcatctttaccacgccaaagtgtggcaagcggctcttttaattcaaccatctaaaccacctgtaatgatatccgcggctttttctggcaagctatacaaatcctgagtatcggcataatggcgagcattctccgcccaggccattcgcaatgggctctgagttaacgctttacgtaaaacttcatttaattgttcctgagagaaaggttcagcgatgaccgttccacaattggcatccgcaatataatgcgcgtacccacataccgctgttgttaaaacaggtaacccagcagtgatcgcttctagaagaacgatacccgcggcttcctgataagcgggatgcagtaataaatcagcggctgccattaattcactcacatcattgcgaccggagaagaaatgcacattgctccgcacgccgagtttttctgccagcgcttcaaattttcgcggcttatcctgaccaacaacaaataaaagcgtattgtgacgtaaactttccggtaagcttgccaaagcttcaatactgcgatctacacctttacggccaaaatcacttccaacctgcagtaataagttttgttgctcttttatgccatttttctggcgataaatttcacggctgtttgggatttgctcactgtattttctgtccggataaataccgggaggaagaatttgaaaacgttcaggttcagtttgataatgcttctggaaatcggcgatttgcttatcggtcagcatcataagtttcgtgcttttaccctgctcgaaagtcgctcgctcaaatgcggcataatggcgatatcgacttgttaaacgatataaaaaacctttttcttgcgcaactttctcggcgtaacaaacatcagcggcaaaataaacatccaggccaggcatcttattaaacccaacaacgcgatctgcgggatgctctttgagatgattttgtacccaggcataatattctgcattgcgtccatggttggtatgggacttaactggcacctgaataagctcaaatgctttcgggcaatcgccttcccagctctgtgtatatacccgaacatggtggccccgtgcggcaactgtacttgcaatgcgcataaagtcacgttgaagcccaccaaatggaaaatatttatataaacaaaacgccacgatcataattgtgcattcctgtcagcactaggggcatcttctggcaacagcttttccgtagcggcgatcacatcctccgctgggataacagaaagatattttttgttgcggtcaagttcatgccgggtcggcattttctgataattccccgcccagaattgaataatattctcggtccagggacgccagaatacgtgatccgttgcaccaaatagactaatgactggcgttttcactgccgctgcaatatgtcccggcgcagaatccacaccaataaaaagcactgcatgatcaattaatgcacccagttcaggaaaacgtgttttacctgcaaggccagtaatgggttttgtttcgcaacctcgtgcaatctcatctacacaagcgagatcatctgcgctgggcccacaggttagcacaacctgatagcctcgctgttgcagcgcatcgataaccttagaaaatttatcgttatcccaacacttaaatatctgacgcgctgtcggttggatgacaacataatgatcttttacgcccagggcatctaattcccggcgcatcttcttccagcaatcttcggcgtaactcattgttgtgtcggtgtagaaatcggtaatacctaatggctcaaggacgcttaaattacgctcaacaatatgtgtaccgtgtattggcgctaagtgtgtgaagctttttttccaaataccatgctgccgatgaccataaagttggcttattttcatccgtgcaggtaaacaacgtaccagcagcgccaccatccactgatccgtaagattaatgaccaggtcataattattcgcacgcagagtttttatcaagctaagcacatttttaattttatcgaaagttcccgcacctttattgcttatcccatagagcgcattaatttccgggttttcagacaaaatagggatggtgtcctgataaagcagcatatcgatttttgcatcaggataattctgcttgagcgtactgatgacaggagtagttaataacatatccccatgatatcgcatctttatgaccaggatttttcgaaatggcttttccactagcgactcttttgtgtgattgtctggttaagttaagcagaaaaaagcacgctaccgccccaggctcaacagctacctgaatactgataacgcacttactttgacgtgctagtgtatcatttctttcgcagcaatccgacccgaatgatttttatacacaaaatatactttaatcataaaaatcaaatagataaaaaatagcatttcgataatgtcagtacggcctatgtagatttgaaaatggggccgagtttcaatgaatcgcataaaaatacaaaaaaaatgaagatgtagcggcagatcagaccaaactgaagctatttaagtcaaaaacgggaaaagtaatggtaaagccacagctaaatacatagaatccccagcacatccataagtcagctatttactatgctcgaattgctttacaccgcccttctctaccttattcagccgctgatctggatacggctctgggtgcgcggacgtaaggctccggcctatcgaaaacgctggggtgaacgttacggtttttaccgccatccgctaaaaccaggcggcattatgctgcactccgtctccgtcggtgaaactctggcggcaatcccgttggtgcgcgcgctgcgtcatcgttatcctgatttaccgattaccgtaacaaccatgacgccaaccggtagcgagcgcgtacaaagcgctttcgggaaggatgttcagcacgtttatctgccgtatgatctgcccgatgcactcaaccgtttcctgaataaagtcgaccctaaactggtgttgattatggaaaccgaactatggcctaacctgattgcggcgctacataaacgtaaaattccgctggtgatcgctaacgcgcgactctctgcccgcagcgccgcaggttatgccaaactgggtaaattcgtccgtcgcttgctgcgtcgtattacgctgattgctgcgcaaaatgaagaagatggtgcacgttttgtggcgctgggcgcaaaaaataatcaggtgaccgttaccggtagcctgaaattcgatatttctgtaacgccgcagttggctgctaaagccgtgacgctgcgccgccagtgggcaccacaccgcccggtatggattgccaccagcactcacgaaggcgaagagagtgtggtgatcgccgcacatcaggcattgttacagcaattcccgaatttattgctcatcctggtaccccgtcatccggaacgcttcccggatgcgattaaccttgtccgccaggctggactaagctatatcacacgctctagtggggaagtcccctccaccagcacgcaggttgtggttggcgatacgatgggcgagttgatgttactgtatggcattgccgatctcgcctttgttggcggtagtctggttgaacgtggtgggcataatccgctggaagctgccgcacacgctattccggtattgatggggccgcatacttttaactttaaagacatttgcgcgcggctggagcaggcaagcgggctgattaccgttaccgatgccactacgcttgcaaaagaggtttcctctttactcaccgacgccgattaccgtagtttctatggccgtcatgccgttgaagtactgtatcaaaaccagggcgcgctacagcgtctgcttcaactgctggaaccttacctgccaccgaaaacgcattgaggttgttatgcaaaaacgggcgatttatccgggtactttcgatcccattaccaatggtcatatcgatatcgtgacgcgcgccacgcagatgttcgatcacgttattctggcgattgccgccagccccagtaaaaaaccgatgtttaccctggaagagcgtgtggcactggcacagcaggcaaccgcgcatctggggaacgtggaagtggtcgggtttagtgatttaatggcgaacttcgcccgtaatcaacacgctacggtgctgattcgtggcctgcgtgcggtggcagattttgaatatgaaatgcagctggcgcatatgaatcgccacttaatgccggaactggaaagtgtgtttctgatgccgagcaaagagtggagctttatctctagtagcttggtgaaagaggtggcgcgccatcagggcgatgtcacccatttcctgccggagaatgtccatcaggcgctgatggcgaagttagcgtaacgtttatgccggatggtatgccatccggcgcgcatgaattacttctggcactgccgacaataaaacgttgcccgctgcgcatgtttagtcgccacaatcggcgtaccgcacacccgacacggctcaccttttcgcccgtaaacctgcaattcctgagcgaaatagcccggtttaccatcactttgcagaaaatctttcagcgttgtaccaccctgctcaatgctacgcagcaacaccgctttaatcacccgagctaacaattcacactctgccaggctcagactactcgccagccgatccggatggatccccgccgcaaacagactttcgctggcatagatattccctacccctaccaccagcttgttatccatcagccacggtttaatcgccgtttttttcttcgcgcacttctgatgcagatactcaccattgaaatcgtcgctaagcggctccggtccaagatgggtcagcacattatgcccttccagctctttggtccacagccaggcaccaaagcggcgcggatcggtgtagcgcagcactttgccgttgctcatcaccaaatccacatggtcatgcttttcagggggaagttcttctggaaggatgcgcaggctgccagacatccctaaatgaatgataatccagccctcaggcagctccagcagcagatatttagcccgccgctgcacgctaagcactggttggtcgcttaaacggtagatctcttcactaaccggccagcgcaagcgtccgttgcgcaccactgcatgaagaatggttgcaccaacgagatgcggttctatgccgcggcggctggtttcaacttcgggtaattcaggcatagcatctccaggaatgaacagatgcagtcaatatgggggcaagcagataacaaaaaaccccgccggagcgaggttttttgttacatcaaagcgagaattatttgattttcgcttctttgtagatcacgtgctggcgaacaactggatcgaattttttcagttccagtttttccggcttagtacgtttgttcttcgtagtggtatagaagtgaccagtaccagcagaagaaaccagcttgattttctcacgaatacctttagccatgatttatttcctctaagtacttagtacttttcgccacgggcacgcagttcagccagaactgtatcgatgccttttttatcgattacacgcatacctttagcagatacgcgcagggtgacaaaacgcttctcgctctcaacccagaaacggtgagagtgcaggttcggcaggaaacggcgtttagtcgcgttcagtgcgtgggaacggttgttaccggtcaccggacgcttgccagtaacttggcagactcgggacatgtctattctccaaaaatcaaattagctcgagcttcgtatggggtattggcgcctcgtcaggctttacagcccggtcatcgcagttctatgtgaactctcgattgccaggcccaaatgccaaacccgagattctcaaaggtggcgtagtatacgctgactcagcgatgtgctcaagtcccgaacagacaaagatcccgaaggatcgcgcatagcgggttaaatccagccgcgttcggcaaaagaaacatactctccacgcccaatcacgatatggtcgagcacgcgtaaatccatgaactgacaactctttattatccgttcagtaatgagtttatccgctttactgggttcagcacaaccgctagggtgattatgtgcaaggatcagcgcgctggcgtttatttttatcgcttcgcggataatttcccgaggatggacttcaacatggtttagcgtgccggaaaaaagacgcctatgcgttataacccggtgttgggagtcgagaaagatcaccataaagatctcccgctcctcacccgtgagctggctttgtaaaaattccctcgtcatctccgggctgagtaaagggctttcttcacgcatccgcacgttgtagtaacgccgcgccagttcagcaatcccctttaactgggcaaatttcgccacgccaattccatgaacgccactaaattgttcatattcagaggttaacaagccataaagagagccgaaattctccagcatctcttttgccagggttaatacatctttaccgcgcgttccggtacgcagaaatagcgccagcagctcgacatccgttaaggcgctaataccaaacttcagcattttttcgcgcggcatcaacagctgactattgtttttcaccttcacctcctttgtggtgctcgcatcctgtcatagccgtttcgttaaatcgacggccagttttcaatcctggaaagcgcctcgcaaagtgaatctcaggtgaaggcacgacaacaaaagtattgtgataaaatcgccaacttctggtgtcaccctacaggaaaaatcatcatgagcctggccggtaaaaaaatcgttctcggcgttagcggcggtattgctgcctataaaacccctgaactggtgcgtcgtttgcgcgatcgcggggccgacgtccgcgtagccatgaccgaagcggcaaaagcctttatcaccccacttagcttgcaggcggtttctggttatcccgtttccgacagtctgctggacccggcagccgaagccgctatgggccatattgagctgggtaaatgggctgatttagtgattctcgcccctgccacggcagatttgattgcccgtgttgctgccggaatggcgaatgacctggtaagcacgatttgtctggctacacctgcgcctgtagccgtgctccccgccatgaaccagcagatgtaccgtgccgctgccacgcagcataatttagaggtgcttgcttcccgtggtttgctcatctgggggccagacagtggcagtcaggcttgtggtgatatcggtcctgggcgaatgctcgatccgttaaccattgtggatatggcggtagcgcattttagccccgtcaacgacctgaaacatctgaacattatgattaccgccggcccgacgcgtgaaccgctcgatccggtgcgttatatctctaatcacagctccggcaagatgggttttgctatcgccgccgccgctgcccgtcgtggcgcgaacgtcacgctggtaagtggtccggttagtctaccgacgccaccgtttgttaaacgtgttgatgtgatgaccgcgctggaaatggaagccgccgtgaatgcttctgtacagcagcaaaatatttttatcggctgcgccgccgtggcggattatcgcgcagctaccgtggccccagagaaaatcaaaaagcaggccacgcagggtgatgaattaacaataaaaatggttaaaaaccccgatatcgtcgcaggcgttgccgcactaaaagaccatcgaccctacgtcgttggatttgccgccgaaacaaataatgtggaagaatacgcccggcaaaaacgtatccgtaaaaaccttgatctgatctgcgcgaacgatgtttcccagccaactcaaggatttaacagcgacaacaacgcattacaccttttctggcaggacggagataaagtcttaccgcttgagcgcaaagagctccttggccaattattactcgacgagatcgtgacccgttatgatgaaaaaaatcgacgttaagattctggacccgcgcgttgggaaggaatttccgctcccgacttatgccacctctggctctgccggacttgacctgcgtgcctgtctcaacgacgccgtagaactggctccgggtgacactacgctggttccgaccgggctggcgattcatattgccgatcctagtctggcggcaatgatgctgccgcgctccggattgggacataagcacggtatcgtgcttggtaacctggtaggattgatcgattctgactatcagggccagttgatgatttccgtgtggaaccgtggtcaggacagcttcaccattcaacctggcgaacgcatcgcccagatgatttttgttccggtagtacaggctgaatttaatctggtggaagatttcgacgccaccgaccgcggtgaaggcggctttggtcactctggtcgtcagtaacacatacgcatccgaataacgtcataacatagccgcaaacatttcgtttgcggtcatagcgtgggtgccgcctggcaagtgcttattttcaggggtattttgtaacatggcagaaaaacaaactgcgaaaaggaaccgtcgcgaggaaatacttcagtctctggcgctgatgctggaatccagcgatggaagccaacgtatcacgacggcaaaactggccgcctctgtcggcgtttccgaagcggcactgtatcgccacttccccagtaagacccgcatgttcgatagcctgattgagtttatcgaagatagcctgattactcgcatcaacctgattctgaaagatgagaaagacaccacagcgcgcctgcgtctgattgtgttgctgcttctcggttttggtgagcgtaatcctggcctgacccgcatcctcactggtcatgcgctaatgtttgaacaggatcgcctgcaagggcgcatcaaccagctgttcgagcgtattgaagcgcagctgcgccaggtattgcgtgaaaagagaatgcgtgagggtgaaggttacaccaccgatgaaaccctgctggcaagccagatcctggccttctgtgaaggtatgctgagtcgttttgtccgcagcgaatttaaataccgcccgacggatgattttgacgcccgctggccgctaattgcggcacagttgcagtaatatgacgccggatgacttttcatccggcgagtttctttaaacgccaaactcttcgcgataggccttaaccgccgccagatgttccgccatttccggcttctcttccaggtaagcaatcaggtctttcagggtgatgatagagatcactttgcagttgtaatcacgctcaacttcctgaatcgcgctaatctcgccgcgcccgcgttcctgacgatcgaggctaatcaacacgccagcaagcgtcgcgccattggcctgaataatctccatgctctcgcgaatcgccgttccggcggtgatcacatcatctaccagcattacgcgtccttgtaacgcgctaccaaccagattgccgccttcaccgtggtcttttgcttctttgcggttaaagcagtacggcaggtccaggtcgtgatgctccgccagtgccacagcggttgtggtggcaatcgggatccctttgtaagcagggccaaacagcagatcgaactcaatgccggaatccaccaacgcttcagcgtaaaaacggcctaacagtgccagatcgcgcccggtattaaacagcccggcgttgaagaaataggggcttttgcgcccggatttcagcgtaaactcgccaaactttaacacctgcttgctaagcgcaaattcaataaactggcgctgatatggtttcatgccttcgctcctcatcttacttttctacagacaaaaaaaaggcgactcatcagtcgccttaaaaatcagtttgccagcgccgccttctgcgtcgttacaatggattgctttcccctcgggccagagccaacaagatgagtagctcttcatgggtgaacggctcgccttctgccgtcccctgcacttcaatgatgcgcccgtcttcggtcatcactacgttcatgtcggtctctgcggcagagtcttcaacgtattccagatcgcaaaccgcttcgccgttcacaattccgacagaaactgcggctaccatccctttcatcggattggttttcagcttgccgttttccaccagcttctgtagcgcatctaccagcgccacgcaggcacccgtaatgctcgcggtacgcgtgccaccatcagcctgaagcacgtcgcagtccagcgtaatggtgaactcacccagcgctttcaaatctactgccgcgcgaagagcacgggcgatcagacgctggatttccattgtgcgtccaccctgcttacctttcgccgcttcacgagcgttacgggtgtgggtagaacgtggcagcatgccgtactctgcggtgatccagccctggccctgacctttcaggaagcgcggcacgccttcttcaatagaggcggtacacaacactttggtatcgccaaattcgaccagcacgctgccttctgcatgttttgtatagttacgagtcagggtaacgggacgcacctgattattgctacggcctgctggacgcatattgaaatctccggcttgaaacaaatgtggctgcgcattatacggacttccggcggttattcctatcctgacaaggcatcgatggctataatccttccacctctccttttataaacaggaacgtctatgatccgcagtatgaccgcctacgcccggcgtgaaatcaagggtgaatgggggagcgcaacctgggaaatgcgcagcgtaaaccagcgttatctggaaacttactttcgtctgccggagcagttccgtagccttgaacctgtcgttcgcgagcgtattcgttctcgcctgacgcgcggtaaagtggaatgtaccctgcgctatgagccagatgttagcgcgcaaggtgagctgatcctcaacgaaaaactggctaaacagctggtaactgccgcgaactgggtaaaaatgcagagtgacgaaggggaaatcaacccggttgatattctacgctggccgggcgtgatggcagcccaggagcaggatcttgacgccattgccgctgaaattctcgcggcgctggatggtacgctggacgactttattgtcgcgcgcgaaaccgaaggtcaggcactgaaagcattgatcgagcagcgtctggaaggcgtcaccgccgaagtggtcaaagtccgctcccatatgccggaaatcctgcaatggcagcgtgagcgtctggtcgcgaagctggaagatgctcaggtgcaactggaaaacaaccgtctggagcaggaactggttctgctggcacaacgaattgacgttgccgaagaactggatcgcctcgaagcgcatgtcaaagagacctacaacattctgaagaaaaaagaagcggttggtcgtcgtctggattttatgatgcaggagttcaaccgcgagagcaacactcttgcgagcaagtctatcaatgccgaagtgacaaactccgccatcgagctgaaagtgttgattgagcagatgcgcgagcagattcagaacatcgaataactcgtaacgccaattcttacttttccgccttcacaaatgccgccactcaaacagagcggcatttttcttccccgcaacattcaattctgttttgcgtgcctgctccagattttgcgatgtttttttgcccagcacactgagaacgtgagatactcacaactgtatataaatacagttacagatttactttctttgcaattgatatcacatggagtgggcaatgaacgaacatcatcaaccttttgaagagataaaactgattaatgcaaacggagcagaacaatggagtgcaagacaacttgggaaactactgggttatagtgagtatcgtcactttatacctgtattaacgcgcgccaaagaagcctgtgagaacagtggtcacacaattgatgaccatttcgaggagatcctcgatatggtcaaaattggcagtaatgccaaaagagcattaaaagacatcgtactctcccgctatgcctgttacctggtagtacaaaacggcgaccctgcgaaaccggtcattgcggcagggcagacttattttgctatccagacccgacggcaggagcttgctgacgatgaagcatttaagcaacttcgtgaagacgaaaagcgtctgtttctgagaaatgagttgaaagaacataacaaacaattggttgaggcagcacagcaagctggggtagcgacagctactgatttcgccatatttcagaatcatggttaccaggggctgtatggtggattagatcagaaagctattcatcagcggaaggggctgaaaaagaatcagaagatcctggatcatatgggtagtacagaactggcggctaatctctttcgagctacccaaacagaagaaaaactcaagcgggatggcgtgaatagtaaacagcaagcaaacaccacacactttgacgtgggtcgcaaggtgaggcaaaccattcaggaacttggcggaaccatgcctgaggagttgccgaccccgcaggtcagcatcaagcagttggaaaacagtgtaaaaattacagagaagaaataacagaaactaaaaactctttttgttgattgagacacccgatgcgtaagccaaggtccaggtgcagtgaacacaatggctaaatattgcacctttcttttccccctcagttttaacctattttttcttatgcattttctcagacaagaagtcagaagaatgcatctctgctacagaaaatagcgatttcacataactacaagttatcaatttcccctccccttaaaaaatctcaatcgtgacaatgcgcacaaatcgctaccctgccagacagatttttagggagagaaccatgctgttacacattttgtatttggttggcattactgccgaagccatgacgggggcgctggcggccggacgacggcgcatggatacatttggcgtaattattattgcgaccgccaccgcaattggcggagggagtgtgcgcgatattctgctgggccactatccgctcggctgggtcaaacacccggaatatgtgattatcgtcgctaccgccgcagtactcaccactatcgttgctcctgtaatgccttacctgcgcaaagtgtttctggtgctcgatgcgctcggactggtggtcttttctatcatcggggcacaggttgcactggatatggggcacggcccaattattgccgttgtcgcggcggtaaccaccggcgtgtttggcggcgttttgcgcgatatgttctgtaaacgtatcccactggtattccagaaagagttgtatgccggtgtcagttttgcctccgccgtgctgtacatcgcgctgcaacactatgtttctaaccatgatgtggtaattatctccaccctggtattcggcttttttgcccgcttactggcgctacgccttaagctgggattaccggtcttttactacagccacgaaggacattaaggttcaaaacctgtgatctgctgggcagccagccaactgcccagcttcttgatttgcgcattttccttccattcaataacctgtctggcgcgtccgcttccagtccccggcagctgctgccagaactgctccgtgctaaataaaagttggctccaggaccgttcatcactggcattaagcgccgcccgggttagcggtattcccattgccatcacccagcgagtaaaaggctgcttacgagccagattaaactgatgccatagctgcgcacttttacttttcgcgatccccggcgtgttctgtaattgctctggcgttaataaaagccaggaaaagatatgttcaaagcgatgagtctgatgcagcgcgcgccaaccggcctcaccaatgccatccagcccaagaacctgttttgcccccagccagactaagcgactaatgaactgttcctgacaaacatcagaagcaaagtagcaggtcaagctgttaaagcggttttctggcggtgtcggttttgtacgttctgcaccgcgccacaccacatcatcaatgcgaggaataccctgaccggcaaggctgacgagaatctgatcaccaggcgcaatatcccactcctgccagcgcctgacggaaccaatattcacccgctggacttttttatcatccagcatgacaggtgcgagactcgcaaccacgcttattttaccgctcttacccaccgcaaactgaattgccttcacttcggcaacctgagctacaggttgatatttccaggccaccagccactctgcctggcccggtagccaatggcgggattctggctctttcgccgctcgtacaactacgccatcggtgacgaagggtaattccgctttccaccactcattgcgtacgcgcgcaacttcatcagcatttttcaccgcacgggtatacgtctgcgttagagtaaaacctgcggtagccagctcttttaaacgatcagacattaactgcggtccatccggccatgcccagacaaaaacgcccagagaattcagcgtgtcgctatcgtcctggcgcatcatcaagccagcaacttttgcgcgggcatttattccccccatttgttgttggatatgcccctcgcgctggagaaatatttccccctgaagcgtactgttggctaaaggcccgctaacggtttgcggcacagcggaaattaagctaactttctgcgtccagtcctcgcctttcaggccattaccgcgactgattgctttgttcagtttcccgtcccgataaaccagggttaccgcaacgccatcaacttttggctgcacccaaagatcgctacgttctcgcatccacagacttaatgcgtttttatccaccattttgcgtacacccgtatgggcaaccggatgcataaccgcaccatttaaaggcggcatcatcacgtcgcggggctcgctcccaaagcagcgttgccactgcgtaagacgggcgcttaactgatcgtaaacaccgtcttccacctcactttttccttccttccagtagtcatcgtcccactgttttatttgctgttgcaggcgggaaatttcttcctgtgctctggctgggctccaggccggacagaccgcccacacagaactttgccagcacaagatacctattaatatcgccatccatactttcatcatcacctccgctgtagatagtcaggcagatatacaacgtgatgaaagcaaagccgagtggcaaaaacggagtctgcgaggacgcttcctgaaaatcgtctttattgcagtgaatgacaggcaaatgcggaagcagctacgcaaaacgcaacaactttgcgcaaaaagtgtgagcaagggctacgtcacatggccgcgccgtgtataataagctcgtatgtaggctttatttcgctaatcacatacgaaagatactcatggctcaaggcacgctttatattgtttctgcccccagtggcgcgggtaaatccagcctgattcaggctttattaaaaacccaaccgttgtatgacacccaggtttctgttagtcacaccacacgccaaccgcgtcctggtgaagtccacggtgaacattatttctttgttaatcatgatgaatttaaagaaatgattagcagagatgcgttcctcgaacacgcagaagtttttggtaattactatggcactagccgtgaggccattgagcaagtactggcgaccggtgtcgatgtttttctcgatatcgactggcagggcgcgcagcaaattcgccagaagatgccgcacgcgcggagtatctttattttaccgccgtccaaaattgaactggaccgccgtctacgcggtcgcggtcaggacagcgaagaggtcattgcaaagcgtatggcgcaagctgttgcagaaatgagccattacgccgaatatgattatctgattgtgaatgatgacttcgataccgcgttgaccgatttgaagaccattattcgcgccgaacgtctgcgcatgagccgccaaaagcagcgtcatgacgctttaatcagcaaattgttggcagactgaacctgatttcagtatcatgcccagtcatttcttcacctgtggagctttttaagtatggcacgcgtaactgttcaggacgctgtagagaaaattggtaaccgttttgacctggtactggtcgccgcgcgtcgcgctcgtcagatgcaggtaggcggaaaggatccgctggtaccggaagaaaacgataaaaccactgtaatcgcgctgcgcgaaatcgaagaaggtctgatcaacaaccagatcctcgacgttcgcgaacgccaggaacagcaagagcaggaagccgctgaattacaagccgttaccgctattgctgaaggtcgtcgttaatcacaaagcgggtcgcccttgtatctgtttgaaagcctgaatcaactgattcaaacctacctgccggaagaccaaatcaagcgtctgcggcaggcgtatctcgttgcacgtgatgctcacgaggggcaaacacgtagtagcggtgaaccctatatcacgcacccggtagcggttgcctgcattctggccgagatgaaactcgactatgaaacgctgatggcggcgctgctgcatgacgtgattgaagatactcccgccacctaccaggatatggaacagctttttggtaaaagcgtcgccgagctggtagagggggtgagcaaacttgataaactcaagttccgcgataagaaagaggcgcaggccgaaaactttcgcaagatgattatggcgatggtgcaggatatccgcgtcatcctcatcaaacttgccgaccgtacccacaacatgcgcacgctgggcagtcttcgcccggacaaacgtcgccgcatcgcccgtgaaactctcgaaatttatagcccgctggcgcaccgtttaggtatccaccacattaaaaccgaactcgaagagctgggttttgaggcgctgtatcccaaccgttatcgcgtaatcaaagaagtggtgaaagccgcgcgcggcaaccgtaaagagatgatccagaagattctttctgaaatcgaagggcgtttgcaggaagcgggaataccgtgccgcgtcagtggtcgcgagaagcatctttatagcatttactgcaaaatggtgctcaaagagcagcgttttcacagcatcatggacatctacgctttccgcgtgatcgtcaatgattctgacacctgttatcgcgtgctgggccagatgcacagcctgtacaagccgcgtccgggccgcgtgaaagactatatcgccattccaaaagcgaacggctatcagtctttgcacaccagcatgatcggcccgcacggtgtgccggttgaggtccagatccgtaccgaagatatggaccagatggcggagatgggtgttgccgcgcactgggcttataaagagcacggcgaaaccagtactaccgcacaaatccgcgcccagcgctggatgcaaagcctgctggagctgcaacagagcgccggtagtagctttgaatttatcgagagcgttaaatccgatctcttcccggatgagatttacgttttcacaccggaagggcgcattgtcgagctgcctgccggtgcaacgcccgtcgacttcgcttatgcagtgcataccgatatcggtcatgcctgcgtgggcgcacgcgttgaccgccagccttacccgctgagccagccgcttaccagcggtcaaaccgttgaaatcattaccgctccgggcgctcgcccgaatgccgcttggctgaactttgtcgttagcagcaaagcgcgcgccaaaattcgtcagttgctgaaaaacctcaagcgtgatgattctgtaagcctgggccgtcgtctgctcaaccatgctttgggtggtagccgtaagctgaatgaaatcccgcaggaaaatattcagcgcgagctggatcgcatgaagctggcaacgcttgacgatctgctggcagaaatcggacttggtaacgcaatgagcgtggtggtcgcgaaaaatctgcaacatggggacgcctccattccaccggcaacccaaagccacggacatctgcccattaaaggtgccgatggcgtgctgatcacctttgcgaaatgctgccgccctattcctggcgacccgattatcgcccacgtcagccccggtaaaggtctggtgatccaccatgaatcctgccgtaatatccgtggctaccagaaagagccagagaagtttatggctgtggaatgggataaagagacggcgcaggagttcatcaccgaaatcaaggtggagatgttcaatcatcagggtgcgctggcaaacctgacggcggcaattaacaccacgactagcaatattcaaagtttgaatacggaagagaaagatggtcgcgtctacagcgcctttattcgtctgaccgctcgtgaccgtgtgcatctggcgaatatcatgcgcaaaatccgcgtgatgccagacgtgattaaagtcacccgaaaccgaaattaatgttttatgaacccaacacgttatgcacgcatctgcgaaatgctcgccaggcggcagcctgatctgaccgtctgcatggagcaggtccacaaacctcataacgtttctgcgattattcgtaccgcagatgccgttggcgtacatgaagttcacgccgtctggcctggtagccgcatgcgcaccatggctagcgcagcggcgggtagtaacagctgggtacaggtgaaaacacaccgcaccattggcgatgccgtcgctcatctcaaaggccagggcatgcagattctggcaacccatctttctgataacgctgtcgatttccgcgaaattgattacactcgcccgacctgcattttgatgggacaggagaaaacgggcatcacgcaggaagcattggccctggcggatcaggacatcatcattccgatgatcggcatggtgcagagcctgaatgtttccgttgccagtgccctcattctttacgaagcccagcgtcagcggcaaaatgcaggcatgtacctgcgtgaaaacagcatgttgccggaagcagagcaacaacgcctgttgtttgaaggcggctatccggtgctggcgaaagtcgcaaaacgcaaaggcctgccttatccccacgtcaatcagcaaggcgagatcgaagctgatgccgactggtgggctactatgcaggctgcagggtaagtgccatgaaaggtcgcctgttagatgctgtcccactcagttccctaacgggcgttggcgcagcacttagtaacaaactggcgaaaatcaacctgcataccgtgcaggatctactcttacaccttcccctgcgctacgaagatcgcacccatctctaccccatcggagaactactgccgggcgtttatgccacggtggaaggcgaagtgctgaactgcaatatctccttcggcggtcggcggatgatgacctgccagatcagcgacggttccggcatcctcaccatgcgctttttcaatttcagcgcggcaatgaaaaatagcctggcggcgggccgccgtgtactggcttatggcgaagcaaagcgcggtaaatatggtgcggagatgatccacccggaataccgcgtgcagggcgatctcagcacgccagaattacaggaaacgctcacgccggtttatccaacaacggaaggcgtaaagcaggccacgctgcgtaaattaaccgaccaggcgctggatctgctcgacacctgcgccattgaagaactcctgccgccggaactgagtcaaggaatgatgacgctaccggaagcgttgcgcactttgcaccgcccgccaccgacgctacagcttagcgatctggaaaccgggcagcatccggcgcaacgtcgtctgattctggaagaactgctggcgcacaacctcagcatgttagccttacgtgccggagcacagcgttttcatgcccagccgctgagcgccaatgacacgctgaaaaataaactcctcgccgccttaccgttcaagccaacgggcgcacaggcacgcgtagtggcggagatcgagcgcgatatggcgctggatgtgccgatgatgcgtctggtgcagggcgatgtaggttccggtaaaacgctggtcgccgccctcgccgcgttgcgtgcgattgcccacggcaaacaggtagcattgatggcaccaaccgaattactcgccgagcagcacgccaataacttccgcaactggtttgcaccgctcggtatcgaagtgggctggctcgccggtaagcagaaaggtaaagcacggctggcacagcaggaagccatcgccagcggtcaggtgcagatgattgtcggtacacacgccatcttccaggaacaggtgcagtttaacggcctggcgctggtgattatcgacgaacagcatcgttttggcgtgcatcagcgtctggcattgtgggagaaaggccagcagcagggcttccatccgcatcagttgatcatgaccgccacgccgatcccccgcacgctggcaatgactgcgtatgccgatctcgataccagcgtgatagatgagctgccgccaggccgcacgccagtgactacggtcgctattcctgatacccgccgtaccgacatcattgaccgcgtgcaccacgcctgcataactgaaggtcgtcaggcatactgggtttgtacgttgattgaagagagcgaattgctggaagcgcaggcggcggaagctacctgggaagagttgaaactggcgctaccagagttgaacgttggcctggtacacgggcggatgaaacctgccgagaaacaggcggtgatggcgagctttaaacaaggtgagctacacctgctggttgccacaaccgttattgaagtcggcgttgatgtgcctaacgccagtctgatgattatcgaaaacccggagcgtctgggtctggcgcagttacaccagctgcgcgggcgcgtaggtcgtggcgcggtggcttctcactgcgtgctgctctacaaaacgccgctttctaaaacggcgcaaattcgcctgcaagtgctgcgcgacagtaacgacggttttgtgattgcgcaaaaagatctggagattcgcggccctggcgaattgttaggcacgcgtcagacgggtaatgctgaatttaaagtggcggatttactgcgcgatcaggcgatgatcccggaagttcagcgcctggcacgccatattcacgaacgttacccacaacaggcaaaagccctgatagaacgctggatgccggagacggaacgttacagcaatgcgtaaaaggcggcagtgagaagaccgccatttcaggttaccctaccttcctgccggatgcgattcatcaccctacaaattcaataaattatgaatcaatacgcaggcttgataagcgaagcgtatcaggcatttgtctttgttgcggcggcacttctaccgccgcttcatcggttaaccggcaaaaatcggcaacatcaaatacaacttaattaccagcgcattgacgatatcgataaagaacgcaccgaccatcggcaccaccaaaaacgccatgtggctcgggccaaagcgttcagtgatcgcctgcatgttggcgattgccgttggcgttgcaccgaggccaaaaccacagtgacccgcagccagcactgccgcatcgtagtttttgcccatcatgcgccaggtaacgaagatggcatacaacgccatgaagatggtctgtaccaccagaatcgccagcatcggcagcgccaggctagccagctcccacagtttcagccccatcaacgccatcgccaggaacaagctcaagcttacgttacccagcacggataccgcacgctcaaagacgcggtaaaagcccattatactcagaccgttgctcagaatcacgccaacaaacagtacacagacgaaggtcggcagttcaaaagcagtgccagccaaaagttgcgcaacaattttccccaccgtcaggcagatagcaatcagcgcgatagtttcaatcagcaccaagctggtgatcatgcgtcccacatccggcttttcaaacgccgtcgggacttcctggtcatccggaataccgttcggcgtggtggagtgtttcaccagatagcgcgccaccggaccgccaatcaagccgcccagcaccagaccgaacgttgcacaggccatcgccacttccgtcgcattggtgaagccataacgttcaatgaacaatttactccacgcagcgcccgtaccgtgaccgccggaaagagtaatagaaccggccaacagccccatcagcggatcaagccctaacaagctagccataccaatgccaatggcattttgcatcaccaacagaccaacaaccacaatcaagaagatgccaaccacacgcccaccggcacgcaaactggcaatgttggcgttcaggccaatggtggcgaagaaagccagcattaacggatcgcgcagggacatatcaaagttgacttcccagcccatgctttttttcagtactagtagcgccagcgccaccaacaaaccacccgcaacaggttccggtatggtgtatttcttcaaaaaggagacggaatggaccaacttacgcccgagcagcaacgtcagcgttgcggcaacaagcgttgctaaagtatcgagatgaaacatagttactcctttgtatccgcatcactctttcatactcgtcatacttcatcgcgcagtggcaacttcatgaactatgacgggtatcgagttatgctttcctgggtcaaattctcagctgttaatgaacaaatggcatggattttaagcagaaaaataccaaaagttatataaaaaagtgcatttatctcatttaaatatttagatgaggatgtggcaaacgtttgcttttctctttcggtcagctaaaatgcccgctttgctaccacgggattgttttcgatgtctgtttccaccctcgagagtgaaaatgcgcaaccggttgcgcagactcaaaacagcgaactgatttaccgtcttgaagatcgtccgccgcttcctcaaaccctgtttgccgcctgtcagcatctgctggcgatgttcgttgcggtgatcacgccagcgctattaatctgccaggcgctgggtttaccggcacaagacacgcaacacattattagtatgagcctgtttgcctccggtgtggcaagcattattcaaattaaggcctggggtccggttggctccgggctgttgtctattcagggcaccagcttcaactttgttgccccgctgattatgggcggtaccgcgctgaaaaccggtggtgctgatgttcctaccatgatggcggctttgttcggcacgttgatgctggcaagttgcaccgagatggtgatctcccgcgttctgcatctggcgcgccgcattattacgccgctggtttctggcgttgtggtgatgattatcggcctgagcctaattcaggttgggttaacgtccattggcggcggttacgcagccatgagcgataacaccttcggcgcaccgaaaaatctgctgctggcaggcgtggtcttagccttaattatcctgcttaaccgtcaacgtaacccttacttacgcgtggccagtctggtaattgcgatggcggccggatatgcgctggcgtggtttatgggcatgttgccagaaagcaacgaacctatgacgcaagaactgattatggtgccaacgccgctctattacggtcttggcattgaatggagtctgctgctgccgctgatgctggtctttatgatcactagcctggaaaccattggcgatatcacggcgacctctgacgtttccgaacagccagtgtccggtccgctgtacatgaaacgcctgaaaggcggcgtgctggcaaacggcctgaacagctttgttagcgcggtgtttaacaccttcccgaactcctgcttcgggcaaaacaacggagtgatccagttgactggtgttgccagccgctatgtcggttttgtcgtcgcgctgatgttgatcgtgctgggtctgttcccggcagtgagcggttttgtacaacacattccagaaccggttctgggcggcgcaacgcttgtaatgtttggcaccatcgccgcctccggtgtgcgtatcgtttctcgtgagccgctgaaccgtcgggcgattctgattatcgcgctgagcctggcggttggtctgggcgtgtctcagcagccgctgattttgcagtttgcccctgaatggctgaaaaacctgctctcctccgggatcgccgcgggcggtattactgccatcgtgctgaatctgattttcccaccagaaaaacagtaattcactggcggcggtaagataattaccgccgcagtctcacctctttaaccattcccgccttgaggattgcgcgtaaatcgtgcataactcccttatgtgcatttcacgggatggaagaccatgaaatttattgggaagctgcttctctacattctcatcgctctgttagtggcgatcgctggcctctattttcttctgcaaacccgctggggagcagaacatatcagcgcatgggtttccgagaatagcgactatcatctggccttcggggcgatggatcaccgtttttccgcgccatctcatatcgtgctggagaacgtcacgtttggtcgtgatggccagcccgcgaccctggtggccaaaagtgtcgacattgcgctaagcagtcggcaactgaccgaaccacgccatgtcgataccatcctgctggaaaacgggacgctgaatctcaccgaccagaccgcgccgctaccgttcaaagccgatcgtctgcaactgcgtgatatggcgtttaatagcccgaatagcgaatggaaactgagcgcgcagcgggtaaatggcggcgtagttccgtggagtccaaaagccggtaaagtgctgggtacgaaggcgcagattcagtttagtgccggaagccttagcctcaatgatgttcctgccaccaatgtactgattgaaggcagtattgataacgatcgcgttacgctgactaacctgggtgccgacatcgcccgcgggacattaaccggaaacgcgcagcgtaacgccgacggcagctggcaagtggaaaacctgcgcatggcggatatacgtctacaaagcgaaaaaagcctaaccgacttctttgcgccattacgctctgtcccgagcttgcagattggtcgcctggaagtgatcgatgctcgtttgcaaggtccggactgggcggtgaccgacctcgatctcagcttgcgcaacatgaccttcagtaaagatgactggcagacacaggaaggcaaactgagcatgaacgctagcgagttcatttatggtagcctgcatttatttgacccgattataaacacggaattttccccgcagggcgtagcgctgcgccagttcaccagccgctgggaagggggtatggtcagaacgagtgggaactggctgcgtgacgggaaaacgttgatccttgatgatgcggcaattgccgggctggaatataccttgccgaaaaactggcaacagttgtggatggaaacgacacccggttggttaaacagcctgcaactgaagagatttagcgccagccgcaatctgatcattgatatcgaccctgacttcccgtggcagctcaccgcgctcgatggttacggtgccaacctgacgctggttaccgatcataaatggggcgtctggagtggcagcgcgaatctgaatgccgccgccgcgacattcaatcgtgttgatgttcgtcgcccgagcctggcgctgaccgccaacagcagcacggtgaatatcagcgaactgagtgcatttactgaaaaaggcattctggaagccaccgccagtgttagtcaaacgccacaacgtcagacacatatcagcctgaatggacgcggtgtgccggtgaatattttgcaacagtggggatggcctgaattaccgttgactggcgacggcaatattcagcttaccgccagtggcgatattcaggccaatgtcccgttgaaacctacggttagcgggcaattgcatgccgtgaacgccgcaaagcagcaagtgactcaaaccatgaatgctggcatcgtttccagcggtgaagttacaagcacggagccggtgcggtaaacatcaatctcgccgggtacgactcagacgtacccggcattccatcaatagattacaacgtaattgtcagcgcattcccttgaggcttcaccaccagcccctgctcactttcagcctggctaccgtcttgcagaccatttactttcacaacattgcgcaggcacagtgtccagttcttcgcctcgcccgcaccagtcacagtaatcgtgttgccagtacgtgctgcttttaaagtaaagatcacgcttccgtcagcagcgggcacttcacagacggcttcatgcccgtcttgcagattgaagaggtggaatgccgtgccttcgtgccacacgtaatcgggacgttgatcgttgttgcccagcgccagtagagtgttatcacgcacataaacgggcagactcaggaagccgtgctgctgtttatgccagcgactaccgtcgagttcatcgttgtgccacaggtgtgtccagcgaccttccggcaggtagaactgcacatcgcccgcttcagtgaacaccggcgcaaccatcacgttgtcgcctaacatgtattgacggtcaaggtaatcacaagccggatcgtccgggaactccatcatcatggcccgcatcatcggcgtaccccgcgcgttcgcacgcgcagcttcacgatacagatacggcatcatgcggcatttcagttgcgtgaagaagcgcaccacatcacaggactcatcatcgtaggcccacggcacacgataagatttgctaccgtgtaaacggctatggctggagagcaaaccaaacgcgcaccagcgtttgtaaacgtgcgccggagcggtattttcaaagccgccgatatcgtggctccagaagccaaaaccactaaggccaatagacaaaccaccgcgcaggctttccgccatactttcgtagttagcgtaacaatcgccaccccagtgtaccgggaatttctgcgcaccgacggaggcgctgcgggcaaacaagacagcttcttcctcaccaacggtgtccttgagcacgttccacaccagttcgttgtagatgtacgcataatggttatgcattttctgcggatcggaaccgtcaaaccactgaacatcagttgggatacgttcgccaaagtcggtcttaaagcaatcaacgcccatcgcgaccagacctttcagtttgtcggcgtaccatttgcaggcatccggattggtaaagtcataaatcgccagacctggctgccatttatcccactgccataggctaccgtccgggcgtttgagtaaatagcctttctcttgtaactctttaaagacgggggatttttgaccgatataggggttaatccagacgcagattttcagtcctttcgctttcaggcggcggatcatcccttccgggtcagggaaagtcagcgggtcccactcaaaatcgcaccactggaaggctttcatccagaaacagtcaaagtggaaaacatgcagcggcagattgcgttccgccataccatcgataaagctgtttaccgtcgcttcgtcgtagttggtggtaaaactagtggttagccacaggccgaaggaccacgcgggcggcagcgccggacgaccagtaaagcgggtataacgatcaagtaccgctttcggcgtcgggccgtcgataacaaagtattcgagatattcactctcaacgctgaactgcactttggagactttctcgcttcccacttcaaaagagacacactggggatgattgaccagtaccccataaccacggttagtcatgtagaacgggatatttttatacgcctgttcagtacttgtgccgccgtcccggttccaggtctctaccgtctggccattgcgcaccagggcagtaaagcgctctcccagaccgtaaactgtttcgccaacgccaagatcaagccgctcaaacatataattgcgttgattattcgtgtcctgcacgtagccattatttttcacctgactaccggtaatacgttcgccgttgcgcagaaaatccagactccagaactcacctttgctgacacgcgcgcttaagttgccacttttaaactcagcataacgttctgtgttttcgattgtgaccttcacgtcctgcaaaatattgagcggataatgaggaccgttattcagcgccccctgaaaatgctcaatccgcacaccgacaataccttcctgtggggagaaaaagcgcaacgtaaataaaggcgtatcaagctgccaggtacgttcacgcacatcacggggggcagcatagaccaccatttcattatcctgctgttcaacctcgaacacctgaagcgggtgaatcaaattgaggccaggttgaatcaaccagtttccatcgctaattttcattgccgttccttagttctgcacttcttgagaggtgaattgttgctggcaacggcgtttaccctgagccagctgttccataacggttttcagattgtgcgtcgtgagactgtagtagcgtttagcgataatcgcgctcagcaaataacagatcgccggaacaatcgtgaatagcgcaataatgatgctaatcgtggcgctgttctgcgctttttctgccgcatcatatccgccataagccagcatccagccgataagagcgccgccgaaggccaaccccagtttgagcacaaacagcgtgccagcaaaactgatcccggtcaggcgtttaccattgcaccactcgccgtagtcgacggtatcggacatcattacccactggataggtgtcaccagttgatgcaacacaccaatcacgaagatgaagacaaacatagtgatgctggcctgcatgggaacaaagaacatcgcgaggctaatcactgccagcagggcgttcgtccaccagaagatagtgactttacatttccagtcggtcagaggttttgccagtgcggaaccaatcaggttacccacgcaataagtggtgagaaaagcgacaaacacttccggcgtgcccaaaatccatgtgacgtaatacatcatcgccccaccgcgtacgcacaccgccaggatattgaaaatggttagtaaaccgacaatccgccactggtcgttttgccagatatcacgtaaatcttcccgcatagacgttgttgtaggtggtgcttcaacgcgttctttagtggtgaagaaacaaaatgccagcatcatgaatgccaccacggaaaggaccgcgataccgccctggaaaccgagtggtttattatcaccgccaattaaattaaccagtggcatcatcagaacagtagaaagcatgcctcccgcggtcgccagcacaaaacgccaggattgcaggctgatacgctgagtcgggtcattggtgattacaccacccaatgcgcagtaagggatattgacgacggtataaagtaaggtaagtagggtgtaagtaattgctgcatagatcattttgccgttcatactgagatctggcgtgctataggccagtacacagacgatcccgaatggcagtgcgccaaacagtacccacggacgaaatttaccccagcgagagcgcgttcgatcggccaacaaccccatgcaaggatcggaaatcgcatccagtgcacgagcgaccaaaaacatggttccgacaaaaccggcaggaatgccaaaaatatcggtataaaagaacatcatatataacattacgttatcgaaaataatgtggctggcggcgtctcccatgccataaccaattttctctttaacggacaacacttcactcttcatctgcttttccttgatgctataggggtgctgagaccgataacgcattttgtaaaccatccctgtgagagcgaatattccgatatctggttattaatttatgattcttgttttatgtgatcgtggtagcgttaattccgctcatatatcattgtaaaatatgggttttatatgaactataatgctttcgtgataatacgctgcgtgtattaggcggaaaaaactgatctgggggatgtagaaactcaaggaagtagctataatgcgccccgcctccatgtagcaatcgaggcgcggaagatcgtcgtctccggtgaggcggctggacttcaaatccagttggggccgccagcggtcccgggcaggttcgactcctgtgatcttccgccaaaatgcctctcctgacgttctccaaccccttgtaatactgtcaatccagatattttctactgctcaatattcaatcggcttcaggaatacctggtctaaggttttgtgatggacgatgagcggctgaagaatccgcctgtcggttcttctgtcctcgaacgcatccgcgatattcacgccagtatgcgccgtgtttatttgcaggtgatttgcccccctgctgactctcagccaactgtatcgccattaaggtgaagatgttgttttactcgccccagaacacccttttttatacgactattctatttctttaaccgctggcgaaaaaaactgactataaacttcaccaataatcagactgccatcaagattaatttgttcatttaatatatcaaatcaacttgttttatttttactatcaaaaatagctcattgccttactataattaatatataaattcggtaattaattcttaacatgcttttactaataatctcaattgctggccctataatattgcgctagcattgctttctggttgtatcagcgatactcaaaaattcttaatacaatactcattcgactggtacttatttgtaactcagttatattttttcgcccggtgattcagaagaatgcaaaaaacggctaccactccaagtaaaatacttgatctcactgccgcggcatttttacttgtcgcctttctgacgggtattgcgggcgctcttcagactcctaccctaagtatattcctcgcagatgaactgaaagcccgtcctataatggtaggttttttcttcaccggtagcgctattatgggaattctggtcagtcaatttctggcaaggcactccgataaacaaggcgaccgtaaattactgattctgctatgttgcttatttggagtgctggcctgcacgctttttgcgtggaatcgcaactacttcattctcctcagtacgggcgtacttctgagtagttttgcttccaccgcaaacccgcaaatgttcgccctcgcccgtgaacacgccgacagaacaggccgtgagacggtcatgttcagtacatttttacgtgctcagatcagccttgcctgggttatcgggccaccgctcgcttatgaactggcaatgggatttagttttaaagtgatgtatctcaccgctgccatcgcatttgttgtttgcggactgatagtctggttgtttttgccaagtatacaaagaaatattcctgtcgttacccaacccgtagaaattttaccctccacccacaggaagcgggatacgcggctactttttgtggtctgtagtatgatgtgggcggcgaataatctctacatgataaatatgccgctatttattattgatgaactgcatctaaccgataaactgactggagaaatgattggtatcgctgccggtctggaaattccgatgatgttaatcgcaggctattacatgaaacgtattggcaagcgactattaatgctcattgctatcgtgagtggaatgtgtttttacgccagcgtactcatggcgacgactccggcggttgagctggaattgcaaattcttaatgccatcttccttggtattctctgtggtatcggcatgctttattttcaggacttgatgcctgaaaaaataggctctgcgacaacgttatatgcaaatactagtcgcgtcggctggattatcgccggctctgttgacggaattatggttgaaatctggagctaccatgcgttgttctggctggcgatagggatgttgggtattgcgatgatttgcctgctgtttattaaagatatttaactcaccagtctgggctaagaaaaatcggcgtggcgcaaacagagccatcctcgccatttttgctatcatgcctgcatacataaacgacaaaacagtatgcagagggaaaaatgggttccaccagaaaggggatgctgaacgttctgattgccgccgtgttgtggggaagtagtggggtctgcgcgcaatacatcatggagcaaagccagatgagcagccagtttttgactatgacgcgtttgatattcgccggtttgattctactgacgctgagttttgttcatggcgataaaatcttttctattattaacaatcataaagatgccattagcctgctgattttttccgtggttggcgcgctaactgtacagctcacttttttgctaaccatcgaaaaaagcaacgcagccacggcaacggtgctgcaattcctcagtccgacgattatcgtcgcctggttcagtctggtgcgtaaaagccgcccgggcattctggttttctgcgctattttgacaagcctggtcgggacttttttattggtgacacacggtaatccgacgagtttaagcatctctcctgccgcgttgttctggggcattgccagcgcatttgctgctgcattctataccacctatcccagtacgctaattgcccgctatggcacgttaccagtcgtcggctggagtatgctgattggcggtctgattctgttgcctttttatgccagacaaggaacaaactttgtcgttaacggcagtttgattctggcgtttttttatttggtggtcattggtacgtccctgacatttagtctgtacctgaaaggagcacaattaattggcggtccaaaagccagcattttgagctgtgcagaaccattaagtagcgcgctactctctttgctgttgctggggatcacgttcacattaccggactggctgggaacgctgctgattctgagtagcgtgattttgattagtatggattcccgtcgccgcgccagaaaaataaatcgtccggcgcggcataagtgagaattaccagccaggcaccgcgccaccgttaaaaatggtttctgccgctttagcgacttcgggactttgataagattgcagaaattccttcacgttttctgcattcttattatcttcccgtgccaccaaaatattcacatacgggctattcttatcttcaataaatacgctgtcgtgcaccggagaaagcccggtctgctgaatgtaagtggtgctgataatcgctacatcaactttgggatcatccagtacgcgcgggagctgcgccccctcgagttccataatctgcaaatgacgaggattatcggttatatccagcgcggtaggtaataacccttttccctctttcagagtaattagcttctctttttgcaacagtaaaagtgcgcgaccaaggttggtcgggtcgttggggatcgccactgtcgcgccttcttttatttgcgccacggttttgatttttttggaataacccgccatagggaagacaaacgtatttcccaccgctaccagtttataaccatgcgcctgattatcttgttcaagaaagggtcgatgctggaagacattcgcatcaagttcgccatgatttgtcgcatcgttcggtagcaagctaccgctaaatcctaccagttcaacatcgaggccatatttctcttttgccacctttttagcgacttccgcgacatcttgttctgcgccatttataacgccaactttaatgtgttttgcatcgctgctactctggtcgcaacctgccagcagaattccggccagcaataatgcggcccctgtccgtagatgatgtgttgtcagtttcatttttttatccttttattaatgattacctgactatagcggtaaggtcgctgcggtttaaaaaacgaaacgctatcgataagaataaaaaggaataaaagtggaatataaagtctggcacttcttactgaccacgcaagcgcgtttcgtacagcatgatgagagcgatgaaagcaaactacacttatgcttcattcgatacacatttgtaaaaggttgaatccatgaaaccaacgacactactgcttattttcacttttttcgctatgccaggcatcgtatacgccgagagcccttttagcagtctgcagtccgcaaaagagaaaaccacggtattacaagatttacgtaaaatttgcacgccacaggcgagtttaagtgatgaagcgtgggaaaagttaatgttgagtgatgaaaacaataaacaacatatacgcgaggccatcgtggcgatggaacgtaataatcagagcaattattgggaagcgttgggtaaggtagaatgcccggatatgtaagaacagcaacaactactgaccaacgcttctttacctgatatcaggatttcttcattttcacctttgcagtaaccaacaatgcagtcagcaacatcaatgtgccggacaacatcaacgggctagtcagaccaatattatccagcgcataaccgccgattgccgcgccacaggtattagcaagctgaataaccgccacctgaatagacccggctttttctgcctgatcggccaggctgcgggtgatccacgtactccagccgacgggaaccaatgcaaaagttagcccccagataatcgccacgccggtagcaacgattttatcgcttccccacaacgtcagtaccaacgcactcacagccagtattaacggcgcgcctgctaaggccagttttacgctacgtttaagaatgaagctgctaaggctcgtaccaataaagctggcgataccaaaactcaacagcaccagcgttaagccatccacgccgaatcccgccaggttcatatacaccgggcgaatatacgtgaagaaagcaaactgcccggcgaaagacatgaagatggcgatcatccctgccatcacacccggacgttgtaataagcggaaagtattttgtttctgatggctgggttcgcctggcagactaggcaaacttttgataatccagaaaatacacagcacgcccatcaccgccgccgcattaaagacattgcgccaaccgataagctcgcctaaaaaactgcccaacggcgcggcaatcaccagcgcaatagaaaccgcgccgaagatcacgctcagcgccttcggcaccgtacgcggcggcaccagacgcatggtcaggctcgcgctcatcgcccagaacccgcccagcgccagccccagacaggcacgaccgattaaaagcaaactgaaactgttagcaaaggaaaccagcaagcaggagagcgtcagcaaaacggcaaacaaaataacaacgtagcggcggtcagtagcctgaattgtctgggtaataaacaaactggcaaacattgccacaaaggcggtcacggtcacgctttgcccggcaaccccttcgctaatgcctaaatcctgggccattggcgtcaacaaactgacgggcaaaaactcaacgataatcagacaggcgacacaaaacgccacgctgaaaacggcactccagttcggtcgggtgatggcatccgcgccgcggttttcggcaataaattcactcatggtgttacccgtggcatgtttcaggggaaaagcgctccactttaacatactaatgtgactcgcatttaacgtttttgcaacttttacggtgttgctactgctggagttaagatcgaaacggaacagggcaaagattaccggatgcggcgtgaacgtcttatccacccgacaggtcaggcgcggtctgtaggctgataagacgaaacggtttcaatgcaaccagtgaacgccctcggcaggctgaaagaacgcgttatagcgcatctgaaaagcattaatatcctgcatttcaggttcggtttcgcgcagaaaacctagcgccagcctgacctgagcgtcggtaatcggcgcggcgaggcgagctttttgtaaaatccgatgccattgcagcaggttctgttcgctaccatcgacaatgacaatttgccagatgagcaacacctgcgcggcgttttgcaggtggctctcatccggacgatgcaaataacgtaaaaattcgtcaccagcactctttcccatttgatcgaccatgctctccacgggtacgacatcgatgttcagccgatcgctgagacggcgaatcgcttttctggccccggatgtcagcacccgaaaaccaaccacaaacactaccgccagcgtggcgagcattatccagatcatgagttctcctgcgtaatcagaactcatgatatctggaaaccctcgccagttattaatccaccagaataatcttcagtgcaaacagagctgcgaccaccaccacacacaggttcagatcgcgccagcgcccggtgcatactttcatgatgcagtagctcataaagccgagtgcaatcccttcggtgatgctgaaagtaaagggcatcatcaccgtggtaataaacgcaggcacgctttcggtaaaatcatcccagttaacgcgcgccaggctgctagtcatcagcacgccaacaaagattaacgctccggcggttgcgtaaggaggaactatcgccaccagcggactgaagaacataaccaacaggaacataacgccaaccacaaccgcagtcagccccgtgcggccaccgactgccacaccagaagtactttcaatataggcagtaacagagctggtgccgataaacgcacccgccacgctactgacgctatcaacatacagcgccttattcatattggggaatttaccgttaccatctattaagcccgctttatcagttacaccaattaatgttccactactatcaaataggttgatcagcataaaggagaaaatgataccggcgagttcaagtgttaacgcgccgctcaaatctacttcaccaatgacgccgctaatatcaggcggaatggaatagacgccgctaaaatgaacatcaccgaaaaataatccacagcaagacgtcaccacaatagaaaccagcaccgcggcatgaaaatgacgactactcaacacggttataataaaaaaccctaaaatacctaacaacacgccgtgagaacttaaatcgccaatcatcaccagcgtgtctttattggcgacaataacgccagtattttttaatcccattaaggcgataaataatccaattccgctggtgataccaatacgtaaacttaagggaatgttggagatcatccagtaccggatacgaaacagcgtgagcaaaaatagtccaactgcgccccagaatattgcgcccatcccggtctgccaggagatgcccatcgcccccacgaccacgaaggcaaagaaggcgttcagccccattgccggagccagcgccacgggtaagttagcaaatatccccatcgcaatactgccgataccggcaatcaaacaggtggtaacaaacaccactttcgggtccatttgtgccgcgccgaggatttgcgggttcacaaaaacgatgtacaccatggttaaaaaagtggtcatccccgcaatcaattctgtgcggacggtggtcccatgctgaggtagtttaaataatcggctaagcgtcccactttcattactcacgtaatcggtattgtcattattcatttttttgtccattggaggagatttaatcccttgcttttgtaaaacaaatgacaacaacggttcagtgataattatcacatttcaattgcacattaatggatattctttaataatctcgcgacgtttctttatgataaataataatcaaattgataaaatcaaaatgagaaaaatatgaataattctattaaccataaatttcatcacattagccgggctgaataccaggaattgttagccgtttcccgtggcgacgctgttgccgattatattattgataatgtctctattctcgacctgatcaatggcggagaaatttccggcccaattgtgattaaaggacgttacattgccggtgttggcgcagaatacactgatgctccggctttgcagcggattgatgctcgcggcgcaacggcggtgccagggtttattgatgctcacctgcatattgaatccagcatgatgacgccggtcacttttgaaaccgctaccctgccgcgcggcctgacgaccgttatttgcgaccctcatgaaatcgtcaacgtgatgggcgaagccggattcgcctggtttgcccgctgtgccgaacaggcaaggcaaaaccagtacttacaggtcagctcttgcgtacccgccctggaaggctgcgatgttaacggtgccagttttacccttgaacagatgctcgcctggcgggaccatccgcaggttaccggccttgcagaaatgatggactaccctggcgtaattagcgggcagaatgcgctgctcgataaactggatgcatttcgccacctgacgctggacggtcactgcccgggtttgggtggtaaagaacttaacgcctatattactgcgggtattgaaaactgccacgaaagttatcagctggaagaaggacgccggaaattacaactcggcatgagcttgatgatccgcgaagggtccgctgcccgcaatctcaacgcgctggcaccgttgatcaacgaatttaacagcccgcaatgcatgctctgtaccgatgaccgtaacccgtgggagatcgcccatgaaggacacatcgatgccttaattcgccgcctgatcgaacaacacaatgtgccgctgcatgtggcatatcgcgtcgccagctggagcacggcgcgccactttggtctgaatcacctcggcttactggcacccggcaagcaggccgatatcgtcctgttgagcgatgcgcgtaaggtcacggtgcagcaggtactggtgaaaggcgagccgattgatgcgcaaaccttacaggcggaagagagcgcgagactggcacaatccgctccgccatatggcaacaccattgcccgccagccagtttccgccagcgactttgccctgcaatttacgcccggaaaacgctatcgggtcattgacgtcatccataacgaattgattacgcactcccactccagcgtctacagcgaaaatggttttgatcgcgatgatgtgagctttattgccgtacttgagcgttacgggcaacggctggctccggcttgtggtttgcttggcggctttggactgaatgaaggtgcgctggctgcgacggtcagccatgacagccataatattgtggtgatcggtcgcagtgccgaagagatggcgctggcggtcaatcaggtgattcaggatggcggcgggctgtgcgtggtacgtaacggccaggtacaaagtcatctgccgttacccattgccgggctgatgagcaccgacacggcgcagagcctggcggaacaaattgacgccttgaaagccgccgcccgtgaatgcggtccgttacccgatgagccgtttattcagatggcgtttctttctctgccagtgatccccgcgctaaaactaaccagtcaggggctatttgatggcgagaagtttgccttcactacgctggaagtcacggaataataaaaaaagcccggcgtcatgccgggcaaaagtcaccagttacgtttatgccactgtcaactgctgaatttttttctcgcggcggattttgcgttcttccattaccgccactatcgccatcaggcagatacaaccaatcgcggcgatatccagcgcggcgaaggtgcctgcccagccggtaaggccgaataccggcgtcccatcggcaatcattcccagacctaacttggcaaagctgtcaccaatcaggtaagcaaaggtgcctttaataccatcggcagcgccaatcgcttttttaggtacaaagccaacagcagccacaccaatcaacaattgcgggccaaagaccaggaaacccaacgcaaagagagaagccagatagatatattcgttactggcatgttgatacacaccgagcgtggcgataatcagcgccagcgcgatgcaggccaccaggccacggcgaccgttcgccaggtcagagagccagccccacagcagcgtaccgaccagcgcaccagcttcaaacagcgtaaagccctgaatcgccaccgctttagagagtttcagttcctggaacgcgtatacggtactccactggtcgataccaatacgtaccacatagaggaaaatgttggcgaagcacagcagccagatcactttgtttttcagcacatactcaacaaagatctgccacttggtcatatcggtagattctgtctctttgtcctcttcgctgatctcctcgccgaacagttcttcagctttgccgaggccataagattccggggagtcgctgccgtaacgcaggccgataaaaccgacaatcagcgcgataatgctcgggaagataaacatgccgatgacatggccatcgaacaggtaatttgccccgaacagcgccacacctgctgcgcctgcaccgccaaggttgtgagaaatattccagaaaccgaggaatgtcccgcgtttacgacgcggcgtccatttggtgatggtggagtaactgcagctaccgccggtactctggaaaaagccgcttaaggcgtagaaggcaatcatcaggaacaggctaacgctgccgctgcccatactggcactgaagcccagcatacaaatagcagagaggatcagcatgaacggcaggaattgtttggtgtttttgccgtcggcgtagtaggaaaccagcgttttacccacgccataagtgatggagaaacccaggccgatcatccccagctgcgtcatgctcaacccgtaggtgctaatcatatcgttctgcgcgatgttaaagttcttgcgaatcaggtacatcgtcaggtagccgataaagaccaccaggtaggattgcatgaacggtttgaaccacattttgcgccgcacttcgagcggaaggtccagggtcggcttgcgaacctggtttaagaaagccagcatgggttactcctgaaatgaatacctgcgtgaggcatgcattgtaaaaatcagcagcaaatcaggcctgagatagcgtccaggcaaaacctggaaaatttcttagttttgccggatatgaagtgaaaaggtgagatgcatcacgcttcgcgcggtgtctgggcgttcaaaaagggcagtaacagcagtgcggaaatcccggcggcgatagagataaccacaaaaaatccgctccagtgccaggtatcgagtactttcgccagcggccaaccagcaaggctcgcccccagataagcaaacaagccgacaaaccccgtcgccgcccctgccgcctctttgtgggaacactctgccgccgccataccgattaacatctgtgggccaaagacaaaaaaaccaatggtgaagaagcaggttgcctgcatcacgtagctggcaaatggcatcagccacagggagccgacactaagcaaaattccggcggcgaaaatcaaattcatcggccctcggttgccgttaaacaatttgtcgctgccccaaccggctaccagcgcaccgataaatccgcccagttcaaacatcgtcactgccgtattcgccgtgaccagatcgacgcccagtgtctcggacatatacaaattgccccagtcgttgatcgccgcccggaccacatagaccagcacatagcaaaagctaagcagccagatatacggattcagcaacacatatttggtgaggatctctttacgcgtcaaccctgccccttcttgttgttgagcaatttccagcgcgtcgtgtcgccattcaccgaccgccggtaaacctaacgcctgcgggcgatcgcgtagccgccagcagagaaaaatccccacgactatcgccatacaaccagcaatcatcatcccggcacgccagccgtaatgcagcgcagccgctgccatcacaatgggaatgagtgcgccgccgacgttatgcgccgtgttccataatgcccaccaaccgccgcgctcggtacgactataccaggccgttaacagacgcgcacacaccggactaccccagccctggaaaaaggcgttcagcacccagagcacggcaaacgcccataggctcgtgctgaagccaaacagaatgttgataatgcccgtggcgataagccctatccccataaaataacgggcattactgcgatcgctgacaatgccggagacaaacttgctcacgccataggtaatgtaaaacagggtcgctaacaggccgatatcgctacggctgagcacgccgttagcaaggatttctggtacggcggcgttaaaacttttccgcgtgaagtaaaacagcgcgtaacccagccagatggtcagcagaatatgccgacgccagtagcgatagcgggcatcaatttcatatttatcagtcattaatggcgcatcggcaggcgctttcagaaacggcaacatcatcaaaccttagacatagcgttgaggtagagaaacgctgacacgcgtgccgtgcagacaggaaatgtgtaatgtgccacccagcgccgttacgcgctcgcgcattccggtgaggccaaaaccttgttgcccggaacccggcggcaaaccgctgccatcgtcttcaataaccagcatcaaccgttcatcctgctgccagccttgcagggtgaccgcgctggcatcagcatgtttcacaatgttgttcagcccttcctggcagacacgaaacagcgtcacgcgctggttttcgcttaacgcactttcatcgattcgccattcgagatggctgacaataccgcgcccttccagctccatttcccgcatcagactgcggatggcctgctccagggtgagatcatccaactggcgcggacgtaaccgacccaacaaacggcgcaccgcgtcgtaaacgcccaggcttagttgttcgatgagctgcccgctctgcttcacgctggcgttatctgccgccagccgctgaacaatgcccgcctgagtacgaatagcagtgatggtctgaccgatatcatcatgcagctcacgcgccacatcacggcgcacgctctcttcggtttccagcaaccgttcagccagatgctgattgcgcgccagttccttttgcaggctctggttaagttcacgcaaccgctggatgccagcgccaagcaacaaccctgtcagactttgcaccagcaggctgagcaataaatccaccggatgatcgcgccaggtttgactggcgatcagcgcgatggcgttcatcaacgtcgcaatcagcgccccttgccaaccatagtgccaggccagcgcgataatcggcagcgccagacagaatggcgtaaagcggctcagttcgtccggcaatcccaactggagccagagactgataacaaacagcagcaagtaccagaccagatgtcgcccgcgccagttgattggctgagaaaccagactcggaccgagcggcagccaggtgttattggcgagatagtgccagaacaccagacatatcggggccagcgtcaggccgccagttaaagtcagcaacagcgcattccagctctctttgccgtgccaaagccagggcaggctctgcaacaacgccgccgccgttaacgccgccccctgtaacagcaaggtgcgccagtcacgctgatggcgatagcggctgatcagcgctacgggcagtaacgtcagtaaactaccgatcatcaataacggaaaatgggttaaaccgaccgcctgcgttagccagtaaatcagcagccactccgcgcccagcaatacgggccagtatccgcgcgggcattgcagcattagccccagacgcagaccaaacggaaataacagcaccgccatatcagggcgctcaaccagatgcaggctgatactccacaggcaaaaccatgcggcagagaagataaaaaagcaggcaataacggtaattaagcgggagaacaacgtcttcatcaccagccatcaaacatgcggcgcgccagctctacgtcgttactgacgcccagtttttccatcagattggcgcgatggacgtgtaccgttttcggactcaagcccagttcggcggcaatctctttcaccgccattccttgcgccagtttttccgccacctggcgttcacgtttggttagcgggtcctgacgaccggatgccagtttaatggcaatatccggcgtcagataacagccgcccgtggcaaccgtatgcaccgcagcaatgagttcatccgggctacagcgtttggaaagaaagccgcgtgcccccgcgttaagcgcctgctcaaccagcgcaggactgtcgtgaacggagagcataatcgtcgccatacctttcggcagctggcttagcagctccagaccggagatatcgggcatggagatatcgcaaatacacacctgcacaccgcgccccggcagccccgccagcgcctcgcgcccgctaccaaactcggcaactacctgcaaatcaggttccagccccagcagctgcgcaaagccggagcggacgatgaggtgatcgtctataagggcaacggtgatcatggtcttgtcctggcgggtaaaaaaaatacgcgcttaccttaacgataagcgcgatgttgttcaagccttgagcggttactgaaaaaacaccgcgatcttgttaaacatcgtcggatcggactgattacgctgcactttcacgacatcttccagcttatcgatttggcttatcatctgctccagacgctggtcgtcattgaccagtagccagatatggcttttgtcgctgtcctgaatcggcagacaaagaatgccttcaacgttaaaagcgcggcgggcaaaaaggccacaaacgtgggtcattacgcccggatggttgcgaacggtgagctccagaattacgttgtcatgagttgtgttttgcatggcttattcccccaccatttcagtattcgccgcacctggcggcaccatcgggtaaactttttcttcggcatcaatgcgcacatggatcagcgccgggccagggcgattgatgatttcctgcaaactagcctgcggatcggcttcgttattcaaatcacaggtttcgaggccgaatccggcggcaatctgcataaagttgattttgcccggataggtggcggcaaaaacgccttgctcgtagaacagactctgttgctgatgcaccagccccagcgcttcgttgttcatcagaatgattttgacatccagctgattttcactggcggtcgccatctcctgaatattcatcatcaggctgccgtcgccggagaaacacaacactttgcgatccgggttcgccagcgcagcgccaatcgccgcaggcaggccaaaacccatcgtgcccagcccaccggaggtcagccactggcgtgggcgattgagcggataagcttgcgcggtccacatctgatgctgaccaacgtcggtggtgataattgcattgtcatcgacacaggcggcaacggcgttgatcaggccgtaatggcttaacggatcgcacgctttcgggattggacacggaaactcacgctgcaaatccgctaccaactggtgccactctgcacgcggttgcgcttccaccagcgggatcaactgcgccagcacgtcatcaacatccgcctgaatcgccacgtgcggctgcttgattttacccagctctgcacggtcgatatcgacatgaatgattttggcattcggacagaactgctcggttttgccaatcgcccggtcatcaaaacgcgcaccgagcactatcaacaaatccgcctcctgcaaaatatagttggtgctgcgcacgccgtgcatccccagcatacccaggctcaacggatgcgcttttggcaacatgcccagcgccattaaagtcatggtggtaggcagttgcgctttctccgccagttcacgcacccgtgcgggcgcattgatcacaccgccgcccagataaagcaccgggcgtttggcagcgttaatcatcgccgctgcgtcacgaatgctttcttcgctaaaggcgggggcggcggctttttctgccatagcgggctgtgtttcaatctcaaaaactgccgtttgcacatccttaggaatgtctatccacaccgggcctgggcggccactttgcgcaatgcggaaggcatcgctcatgacctgcgggagttcttcgatatgtctgaccagatagttgtgtttggtgatggggatagagatgccgtaggtgtccacttcctggaaggcgtcggtgccgatcatgctggcgggaacctgaccagtgatgcaaatcagcgggatggagtccagccgcgcatcggcaatggcggtcaccaggttagtcgcacccggtccgctacaggccatacagaccgccggtttaccgtcggtgcgcgccattccctgagcgataaagcccgcgccctgttcatgacgggccagaatatggcggatttgcgtgctttggcttaaggcatcgtaaacaggcaggatagaaccgcccggaatgcctgtcacaatcttaatgccctgctgttccaggaaatgaacgataaattctgcgccggtaaagcgcttacgcgtgcttgttgtgccgctacttgccatgctccagtccttttcttctgggccgactttccgggaggtgcttaaacgaaaaaccccgcccggtttgcgccggcggggttttggaatcgtgtgttgttccagtccttacggcgcattgccgacgaccaccaccacacgcacgacgaccactgcggcggatggcgcagttggtagtagttttgcgttgagcatggaagtagtcattggggaccttgttggttttgtgtttaacaatatttatacaagcacagctttacaggggagacaatggaaaatttttcagcaagggaaaattgaggggttgatcacgttttgtactgaattgcagataacaaaaaaccccgccggagcgaggtttcgtcagtcgcctgcggctggtaaccgcaaagcacactgtattatgtcaacactgaaagtatacgtgttccgcgcagaacgcgcaatttcggcacgaattttgacgtatttagtgcatagttgagtatcgatcacagtttgcgttttgtccaaatattactgtttatttatacagtaaacttctataatatcactgtacgcaatgtgttatgcgggggccgcatcgttacccggcgcactaagtcctggctgaaacgggtggtgccgtcagcgccttaaccccgcgtgagcacactgtgttatgtcaacaagcacaacgtttctccttgagataccgcgtgcacaacagctggcaacaggcagcggaaaggtacgtcagctggcagtgctcctgaaccacaggagacgcgtatgaacctggtggatatcgccattcttatcctcaaactcattgttgcagcactgcaactgcttgatgctgttctgaaatacctgaagtaattcagattcaagtcgcaccaaaggggagcgggaaaccgctccccttttatatttagcgtgcgggttggtgtcggatgcgatgctgacgcatcttatccgccctaccatctctcccggcaacatttattgccgcttttgtttacatattctgccgctaaacaattccccattcctggcgtatatctggctaacattcatcaatgtgatagattcctctcccgcatttatgggaatgcgtagtgacttattctaattatttttataaaagcatccgtgataatgaaaaggcaaagaaacgtcaatttgttattgatgttggtattactcgtggccgtcggtcagatggcgcaaaccatttatattccagctattgccgatatggcgcgcgatctcaacgtccgtgaaggggcggtgcagagcgtaatgggcgcttatctgctgacttacggtgtcagtcagctgttttatggcccgatttccgaccgcgtgggccgccgaccggtgatcctcgtcggaatgtccatttttatgctggcaacgctggtcgcggtcacgacctccagtttgacggtgttgattgccgccagcgcgatgcaggggatgggcaccggcgttggcggcgtaatggcgcgtactttaccgcgagatttatatgaacggacacagttgcgccatgctaacagcctgttaaacatggggattctcgtcagtccgttgctcgcaccgctaatcggcggtctgctggatacgatgtggaactggcgcgcctgttatctctttttgttggttctttgtgctggtgtgaccttcagtatggcccgctggatgccggaaacgcgtccggtcgatgcaccgcgcacgcgcctgcttaccagttataaaacgcttttcggtaacagcggttttaactgttatttgctgatgctgattggcggtctggccgggattgccgcctttgaagcctgctccggcgtgctgatgggcgcggtgttagggctgagcagtatgacggtcagtattttgtttattctgccgattccggcagcgttttttggcgcatggtttgccggacgtcccaataaacgcttctccacgttaatgtggcagagcgttatctgctgcctgctggctggcttgctgatgtggatccccgactggtttggcgtgatgaatgtctggacgctgctcgttcccgccgcgctgttctttttcggtgccgggatgctgtttccgctggcgaccagcggcgcgatggagccgttccccttcctggcgggcacggctggcgcgctggtcggcggtctgcaaaacattggttccggcgtgctggcgagcctctctgcgatgttgccgcaaaccggtcagggcagcctggggttgttgatgaccttaatgggattgttgatcgtgctgtgctggctgccgctggcgacgcggatgagccatcaggggcagcccgtttaagcgcacgtcaccgcagcatcgtcatcagctccatgggagaacgatgctgctttatcagatcacgcatcacccgcatatgcggtgcggagtaagaataaaacgcctgatagcccgcacaaagcacgctgtctggcgtctcctgccgagcgtgcgggcacaggcgatgccagtcgcacgcctggcagtcacagcgcggttgcgggttttcgctgccacaccatttttgtaaggtggcgtcaaaaagctcaatgctgatacgactgatatctgcccgcacccaacactcgaacagggcaattaaaaatttcccccacagctctgctgtcacgctagcggccgtcagatcgccccggtcatcaaattcaagatagggaatgagctgtacggagcggatgccccgctgtttgaaattgtgataaaaatcggcaggttgcagagcatccttgtactctacaaccagtttatgcctgtcctcttcagcatcaatgacctgacttcctgtcatgcgactctctcaataaatacgataagttgatgtatatgcgttacagcaaacagtattgcgagagataacaccgcgagggagatcaaaaatttgtcacggactacgtgaaattgggaaaaatcgctattcgtgacatccattaaattgcgattacgggtgtagtgccagaggatcagcgccacgatggcgagaatgccaatgctaatccagaataacatgcccgcctggtgccagttgtgtttgatagccaacgccatcaacgcgccgtagcccagcatggtacgaaaccacgccagacttgtgcgctccggctgcagtcctgggtcggcaatgcgtctggctttgcggctatccggcatacaacaccagtcccataacgttaattatccggcatacaacaccagtcccataacgatcaccgccacgaccatcaatattaagctaatgattaataagctgttggtgtagggcaggtcctctttcagacgcatcgctttttcattgcgtaaccagcgcaagtagccatacatcgctaacccgccggaaaacagacacaacaacaacgccagcagttcgcgaatgacgggcgtggcgaaatctggcgcaagttgatcaagcccaacccccgccgccagaaatcctagtgcagtacggatccacgccagaaaagtacgctcattagccaggctgaagcggtaatcaggcgcttctccgaggcgggaaattttcattgttgctcctttgcaatttcactaacgctctacctttagcggtttttttaagaatttcgtccgcccgtttcctgatatgcttttgccatccgctacaaggaggtcagatgggtatcatagctcaaaataaaatcagtagtttgggcatgctgttcggtgccatcgctttaatgatggggattatccactttagtttcggccctttctccgcaccaccgccaacgtttgaaagcatcgtggcggacaaaacggctgaaattaaaagaggtcttctcgccggaataaaaggcgaaaaaattaccaccgtggagaaaaaagaggacgtagatgtcgataaaatcctcaatcaaagcggtatcgcactggccattgctgcgctactttgcgcatttattggcggtatgcgtaaggaaaatcgctggggcattcgcggcgcgctggtttttggcggcgggacgctggctttccataccttgctttttggtatcggcatcgtgtgcagcattttgctgatattccttatcttttccttcctgaccggcggtagtctggtttaagcagcctgaataatgcccgccgggtgatcatcagcgggcattatcgtcagaacttctgttttttctcctccaccttcaccccttgtgtcggtaggccggtgtcatagtcgcgtacaactgggctatagccatcttgtggacgtggacgaaacgcccccatccagcgcggccgtgcatctttacgccacggacgcagactccattggtaactgcggaacggatcgcgaattttgtccatgtaatccaataaggcgtcatgcattttgctgcgaacgtctgcaaaacggatatcatcgatcaggttatgcatttcatttgggtcattacggcgatcgtaaagttcatcactggtgaagaggttgagtaccagtttaaagtcatccgtcacccagcaacgcaccggaataaaaccgccaaagctgtcatgctcaatctcgtagcggttaaattccaccatcacgccgcgtggctctttcacggcaaggatattttcccccggcagaatctctggtttttcaatatctgccagcgccatcattgtcggcagtaaatcgatatgactgactggcgtatcgacctgtcgccgctccccttgcgggctacggatgatcagcggaatgcgggtgatgtcgtcatacatcgccgcccctttactgatcagcttatgtgcgcccatcatttcgccgtgatcggaggtataaataacccacgtattttcacgttgctctggcgttaaggcattgatgacccgtccgatttggtcatcaacaaagtcattacaggcaaaatagagcggatggtgataaagcccgtcatcaccgactgggcttggcatcgcctgcgcccataagcggtgatgttccggtttgttagccaggtcatcctgtgctttctcgcccagctcgtagtaaaaatcagcgtatttctctaaatactccaccggacaggtgaacgggtgatgcggctcatcatagctaaccaccatcaggaaaggctcgtctgcgcgcgcaggctgttgcagaaaatccaccgcccgattgctgatacgatgcgcccaggtgaaggtttcgtcgatatggttcgcctgtaaatcttcgacgctgtttaggccattgcgccacaggctaatctctttttccgtcagttcgctaagatagttcgccccatcgaaccagtaatcagcgtcccactccggcggacactcgccagtgccgaaatagtcatgaccgtcgagatgccatttgccgatgtaacaggtgtgatagccggcatccttaaagtagcgccccatagtggagatgtttttgcctggcgcgacgttgttggtccacgggccggactggttagcgtagataccggtaaatagtccggcccgtgcaggcgtacaaaccggactacaggtgtaggcggaattaaagcgaataccttccgccgccagactatcaatattttgcgtattcagcggtttaccgctatagcaaccgaccatattggtggcctgggtatcggtcatgacgaacagaaaattggggcgtttcataggctatccttcccgtcgggagtaaaggttacggctgggtcgtgacgatgccgccagctgtcaaaaatcaggtagacaatcactacggcggcaatgaaataactgatcatcgctaaccagcgcgtaccgtagccgccgaattcagccagcccggcatagacgccaatcatcgcgaacaggatgccaatactcgcgatcttgacgtttttccacggtttcatgtccaccgcaaacgcatctttgaaggtgaacggcgtggcgcgcggtttgataaaaccgatcaccagcatcacgaccacgttgatgcagaacgtacaggccagcacatagaggaaatggaagtcgaacttcaccagatagttgatggtgatgtagctgattatgccaatccccatcgctacttttgccgccagcgccgggatgcgcgggaagaaaaagcccataatgatgatggtaaccagcggcacgttgtaaatgccgttgagctgtttcatccagctatacagcccctgcggcgcgttggcgatccacggcgcgaccagcacgctaacgatagcgataaagaaaccaaatttgcgcccgacggtgaccagctgctgcggctcggcattctggttaatgatgcgacggtaaatacccatactgaataacgtactggcgctattcagaaagccgttgaaggtactgatcaccgcaccaaataacaccgcgccgaagaaacccaccattggcactggcagaacgttattgaccagcgtcgggtaggccatgtcggctttcggtaaatcctgatacagatgaaacgcaatcaaccctggcagcaccagtaccagcgggtcgagcattttcagcaccgccgttaacagcgcccccttttgcccttccgccaggcttttactcgccagcgtgcgttgcacgatgccctgatttgtacaccagtaaaaggtgttcaccagaatcaaaccggtaaatgccgcgccaatcggcaagggatcggtcgggccaccgatactgtttaatttctcggcgtgaacggtggtgagttgctcaatgccctgcataaagctgcccttgcccatcgcgattaggccaaataccggcaccatcaacccgccgataaccagcccaataccgttgatggagtccgccactgccattgcgcgcagtccgccgatcaccgcatacaaaattcccgccagaccaagcaaaattaccagtagccagatagccgcaccgtgagaaatctgtaggctttccccgacgtgaaacaggctgttgagcgccaacgcgccggagtagagaacaatcggcagaaagcagacgccggtggcaattaggaagcagaagtcgatgataatacgcgtcgttttatcataacgttcctccagaaaatcggggatggtggcaatgccgcgcttcagatagcgcggtaaaaagattagcgcgaggaagatcagcgtcaccgcactagtcacttcccagcccatcacgctcatgccgcttttgtaggcctgcccggaaaggccgaccagttgttccgtggaaaggttggttagcattaagctagcggcaataaccggcgcttttagactacgtccggcaagaaaatagccttgttggcttccggtatctgttttgcggaccttccaccaggtgatcaccgccaccagcagcgtaaaaccgacaaaactcaagatttgtaagctattcatctcatagcccttatttatgtttatgtcccggacgcatgaatatagggagaggtaaaatgcgtcgggtcaggcagtcagattcttaaaatacaaacgtcgtatccctgaacggattgttttctgttaagttcaggttgtgagcataattcgccggagggatattaaaatgaatggaaaattgcaaagtagtgatgtaaaaaacgaaactccgtacaatattcccttattgattaacgaaaatgtgatctccagcggaatttctctgatcagcctctggcatacctacgccgacgagcattaccgggtgatctggccgcgggacaagaagaaaccgcttatcgccaacagttgggttgcggtgtataccgtacaaggatgtgggaaaattcttttaaagaatggcgaacaaataacactgcatggcaactgtattatattcttaaagccaatggatattcactcttatcactgtgaaggtttagtctgggaacagtactggatggaatttacccccaccagtatgatggatattcccgttggtcagcaaagcgttatttataatggcgaaatttataatcaggaactcaccgaagttgctgagttaataactagtccagaagcaataaaaaataatctggcagtcgcttttctgacgaaaattatttatcagtggatttgtcttatgtacgcagatggtaaaaaagatccacaacggcggcaaattgaaaaattaattgccactttacatgccagtctgcaacaacgctggagcgtagctgatatggctgccacgatcccctgtagcgaagcctggttgcgtcgtctgtttttacgctataccggcaagacgccgaaagaatattacctcgatgcgcgtctggatctggcgctaagcctattaaagcaacaaggaaacagcgttggcgaagtcgctgatacgctcaacttcttcgactcctttcatttcagcaaagcctttaaacataaatttggttatgcgccgagtgccgtgctaaagaatacggaccagcacccaacggatgccagtccacacaattaacgtaactctggccagtacgctttgttggcctccagcaactcatccagaatagctttggcgacgctggcgctcggtaccgttttgctcaacgtaatcgcctgccacaggtgctgataactacgctgttcccaggcgtccacgaccagtttttccaccgccacttgctgactcattaaccctttctgaaactgcgggatatcgcgctccaccagtggttcaggccgtagtagcgcacgcgcatctgtttgcgatcttgcagcccaacaatttgcgccatccggctttcaataccgattggcatgtcacagatgttgaggattttcgcattcgggcgcagacgacgcgtggcttctgcgacaatggctgccgggttggagtagttgagcatccaggcatttggactatatttttccatataatccaccagttccaggacgccgccaatggaacgcatgccgtacgctattccgccgggtccgcaagtttcctgaccaacaacgccgtggcgcagcgggattttttcatccagttcgcgcatcgggtatttgccgacgcggatgtgcgccatgacaaaatcaacgtcgctgaatgccacttcaggatcggtggtgtaactaaacgcaatgtccggcgctttttctttaaggatgactttacaggcttcggcaatcacttcctgccgcgcaccatcgttatcataaaatttcagtgcacgaagcgggaaacggtcctgattcgccaggagcatcaacacgatgcctggcgtaaaggtgcttccaccgcctgcgacaaccacactgaatttggtcattatactgcctccgtaatggcaacattttctgcactttgatgagaattaattaagctatcgagctgttcacgcagctgagatacatgcagaccaatgatcacctgaatggcatcgccactacggaagacgccgtgcgctcccagctttttaaagacttcgtcatccagcgtttgactcatgtcatgcagtgcaatacgtaaacgcgtcgcgcaattgttaatgctggagatattgccgaccccgcccagggcttgcaggataccggcagcctgatccagctctttttttggctctgccgcggtggtttggcctcggctggctttgtattcggctttactgtagagtttcacttccgcatcttcacgtcccggcgtgcacatgttgaactgcagaatcagtgtgcggaaaaccacgaagtacagcagggtaaagcacaacccaatggcgatttgggtcagcatcatatccgcgtggttgctgaacatcgggatccagttttgcggtaaaacttagtcaatcagacctccgcccatgttgcccaccacaccaaagagatacattacggtgctcatactggccgccagcacggcgtgtaccgcaaacagcaacggactaatgaacaggaaggtaaattccagcggttcggtaattcccaccagcatggcggttaaggttgcgggaatcagcaagcccgccacttttacccgattttccggtgcggcagtgaagtacatcgctaaagaaatgcccacggcaccaaagattttactgttaccgtgcagggcaaaaccgccttccgggaacaagcttttcagcggctcggcgctcaaactgaactcttgcagatgctgcgcccagtacatctgaatgccgccttcaacagctgccggaccaaagataaactgtccgtagatgaagtggtgtaaaccggttgggatcagaatacgttcgaggaaggtgtaaacccagaccccaagtgcacccgcgctacgcaggaacgcttgcagagattcaatccccatttgtacttttggccagccgagcaacgtcagccaggcacaggggatcatcaccaggaaggcgataatcaccacataagacgtcccctggaaaatgccgagaaaaaccggcagttttttatcgaacagacggttatgcagcgccgtcacaatgccggaaatgataattgcgccgataatgctggtatcgagggttttaatcccggccatcattgtcagaccgctacctgccaccgcgtcctgagtgaaatcgacgccgaagtagcttccccaggtcattcccatcgcgttgatgaaatagttccaggtcaggaaactcaccatcaccgccagacaagcacgcccctgcgcttgcttagcaaggccaatgggtaaaccgacagcaaaaatcagcggcatattacggaataccgtccaaccgccctcttcaataatgtgtacgatttgcgcgaataaactgttcggatcggtcagactttccccgacaaacatcgggttttgcagcaagatggcaagacccaccacaatcccggcgaagggaaacagcagcactggcgtgaacatcgcgccgccaaagcgttgaatttgactgagcatttccacatcctcttttctcaattctgtaagtaggaagcctgattggttatgcggcaggcctggagcgaggataggaagatgcgatcggcagaacatgacgacccaatgggattcgtgatcgctttcatgcttttcgttgggcggtagagatctacgttttcgcgaaaaagtagacctctgtgagcacaggtacacagcatcgaacacatctttaaaaaaaagatgttttttcaatcgattaagcagaacttgtgtgcgcattacccgggcttgcaggcaaaaaagagatctagagatgatctacaaaagcattgcggagcggttaagaattcgacttaactccgcagatttcacgctaaacagccttcttcccggtgaaaaaaagctggcggaagagtttgcggtaagccggatgaccatccgtaaagccattgacctgctggtagcgtgggggctggtggtccgccgccacggtagtggcacttacctggtgcgcaaagatgtactgcatcaaaccgccagtctgaccgggctggtggaggtgttaaaacggcagggaaaaacggtcaccagccaggtgctgatttttgaaatcatgcctgcgcctccggccattgccagccagttacggattcaaatcaacgagcagatctacttctcccgtcgcgttcgttttgtggaagggaaaccgctgatgctggaagacagctatatgccggtaaaactgttccgtaatcttagcctgcaacatctggaagggagcaagtttgaatatattgaacaagagtgcgggattttgattggcggtaattatgaaagcctgacgccagtgctcgccgatagactgctggcgcggcaaatgaaggtagcggaacacacgccactgctgcggatcaccagcttgagttatagcgagagcggggagtttttgaattatagtgtgatgttcagaaatgccagcgaataccaggtggagtaccatttacggcgactccacccggaaaagagttaaccgatactccagaagagcaccgccagtaattggggggtgataatgcgcaggaacattaccaacggatagacagtggcgtaagagagcgccgccgcaccgctggttggatgaagattattagcaaacgccagcgccggaggatcggtcatggaacctgccagcatcccgcacatggtcaggtaattcattttggctaacatccgcgccagaatgccaacagtaatcagcggaacggcggtgatcagggcaccataaccaatccagcttagcccttcgccattgaccagggtattcacaaaatccccaccagatttcagaccaacgacgctgaggaacagcacgatccccagctcccgcagcgcgaggttggcgcttggcggcataaaccagtacagcttgccgatactgccgatacgcccgaggatcaacgccataatcagcggtccgcccgccagccccagtttcaacgcggccgggaatcctggcacaaagacgggaatagaacctaacaatacgcctagcccgatgccaataaacactggcagcatctgaacctgttgcagtttttgctgcgcattccccagcacattggcaacggcatcaattgcggacggacgccccaccagattgaggatatcgccgaactgcaggctgatatcgccactggcgaccagttcgaccccggcacggttcaggcggctgataacaacgtcatagcgttctttaaagtgcaggtcgcgaatacgttttccgagcacgttttcattggtgaccaccacacgctcgacgcgcaaatcagtgcctttcgtggacaggctagtatcgacctcctgaccaatcaccagttgcgcattatgtaaatccgctggctgacccaccagatgcagcaaatcgcccagttggataatggtatctgggctaggaacttttagggtttcttcgcgtttcagacggctgcagataattttgtcgccgttgagaatcggtacatctttaatggctaaatcatgcaggttagggttctcaacgcgaatattgatagtcttgatcagcgcgccgccattggtgcgactagactcgtgctgctgagcttctgtctcgacattgacgcggaaaataacccgcaacatccacatggtgaacaaaatcccgcaaatgccgaatggatacgccatcgcgtaactcatccccatctgatcgaccatttccattggtgtacccaggtcgcgcaaaatctgctgccctgcccccagcgctggcgtattggtaaccgcaccggagaaaatccccagcactaccggcagtggaatatcaaacagtttatgcaggatggcggtaaccagaccaccgatgatgacgatcagaacagcaaacaggttgaggcgtaatccggagacgcgcaaactggcaaagaagcccggccctacctgaatcccgatagtataaacgaacaggatcaggccaaattcctgaataacatgcagcatatcgctacttaatgtcatccccgcctgagaaacaaaatggccgacgatgatcccaccaaacagcacgccgccaatacctaatcctatgccgcgaaatttgacgttgccgataaacaaaccgacgactgccaccaaagccagaatactgaccgttaatgctatatcactcatcgtccatttctcttgagataacattttaattgctacggattatggctgaatcggtgaagcagatttgccttatagcgcacattatcacgggaaagaacgtgccgaaatatcttaaacagtcgaaatttaacgcattgttgagtaagtaagacaaaaaaagccccaccagaatggcggggcaaagagaatagctagttagctatttaacgcgggacgttcgctgatagcgatacgctgcgctgcgatgggttcaggctcattacgaattaaatcaatatgcagtaaaccgtttacgaaggttgcgccagagacttccatattttcagccagcgtaaagctcaggctaaatggctgattcataagcccttgatgcagccattttttctcttcttttggctgctccggcgtgccttttacgctcaggcgcgtaccttccagttgaatctctaaatcttcctgacggaaacctgccagcgcaagggtaatgcggtagtggttatcgtcgcttttctcaatgttgtacggcgggaagctctggctttcaccggcgttttgcagtgcgttggccagtttgtcaaaaccgatccattgacgcatcagtggggataaatcgaagttacgcatagtcatttctccttctaagaagcgagtaagtacctgcaaatccgaagattcgcatatgctccctgacggcgagcatggagatgtcaggccgcgccaggcggccttagggaattagttgatttcgatacggcgcggttttttcgcttccggaatcacgcgttcgagatcgatatacagcaaaccatttaccaggttagcaccacgaacatgaatgttctcagctaactggaatttgcgttcaaagttgcgttcagcgatgccctggtacagataggtgcgctctttttgttcgtcggcgtgagcacctttcaccaccagcagattatcctgggcggtaatttccagttcgctctcagcaaaaccagccacagcgatagcaatgcggtaatggttttcgtctaccagttcaacgttatacggagggtagccgccattactctggctctggttgttttctaagtggttaaacaaacggtcaaatccaatagcagaacggtaaagcggggataaatcaaagttacgcataatcaatagctcctgaaatcagcgagaatgtaagaccttccacaatggacaggtcaggtagccagaacacccatcaggcgcgtcctcatcggctacgatgtaaaaatgggtctggaaatgaacttttcaagccttatcagcggacttttttttgcagtttatggtctattgcatagactgagggggcagcacgaaacgttaaagtgcgatagccgccacagtgcgacgtaatgatgatgttattttcagcaagggatcgctataactcatcaggccaacacccacgatcaacagatgaatttattatgataagaaatgtgttgttagcgttcatgatatgcagcggaatgacattactcggaggatgctccagcgtgatgtcccataccggagggaaagaaggaacgtatcccggcacccgcgccagcgcaaccatgattggcgacgatgaaaccaactggggcactaagagcctggcgattctcgatatgccgtttaccgctgtgatggacacgcttttactgccgtgggatgtgttccgcaaagacagcagcgtgcgcagccgcgttgaaaaaagcgaagccaacgcgcaagccaccaatgcggttattccaccggccagaatgcctgataactgatttagcgatcagtttcggtgatccacagctggccgccttccatccacgccagccactgaccatccgggctgaagaccacggcgtccgcagaaggactattggcgtggtgttcggttaaatactcaacctcgccgctttgcgcatgggcacaagcaattcgattatccagcacaaagcccaaccattctccactcggatgccagttaaatgcagactgaatatccgttttgttatgggttaactggcgcggctcgccgccctgtgggctgataagccacagttgcacaatgccgttatcatctcgcattaaaaacgcgatttgtgtaccctgcggattacagcgcacccagtggcgcgggacgttgactaaccccggataagcccgatggtgggtaaaggttaaacgtcgctgcacgacgccacgcggtggcgcgggcagggttgtttccgttccgcttaacggcgcatcacctgccgctttccagccagcttcatcttgcggtaactcaacgataaacagctccggcactttctcgccctttgggctaagtgtgtcgccaataaatgccagcgcgtgatttcctacccatccttcttcataagcacgattgatttcatcactgccaggctgtggcgtgggcgtggttttgctcaccagcacgcaccagtggctaccgctgtattcacgcggatgctgcttttgtacgttgaccgggccaaacggcgcagcaacaccgacgtttcgcaaatccagcgccggatcgagttcatgcattacatggtcgttataggtaaagctcaccctttcaccgttcgggctaaagacatgcacatggctgccgccgcgcagcactcctggcgtatacggcgcggtaatatccatcgcatcaaggttactcatcttgccgccttcaacaatcactccgcgccgatgatggaagtcgtaatgccatgtttcatcaggattttccgggccgtggatgaaaacatatttctcactcttcggatgaacggtcaccacgccgacgtgtgcgccctgactcgcgcgatagataacctcgacctcgccggtatggatattcacacgctcaatggtctcgccggtaaagctcgcgccagaaggacgcacgtcaaataccagccactggctgtcgggcgtccaggtattggtattggtgagcaggtgattacggggagcaaaggttatctgtttcatggcgcggtcctgatacaaaacgggtcccgccatcatacttcacaaggacttcactttcagacaatagtcttttgccatcgtgatgaatgtgagtgaaaagatggaacatttcgacgtggcgattattggcctcggcccggcaggaagcgcgttggcacgaaagttagcaggcaaaatgcaggtgatcgcgctggataaaaagcaccagtgtggtactgaaggtttcagcaaaccctgcggcggtctgctggcaccggacgcgcagcgatcttttattcgcgatgggctgacgcttcctgtcgatgtgatcgctaatccgcagattttcagcgtcaaaaccgtcgacgtcgccgcaagcctcacgcgtaactaccagcgaagctatatcaatattaatcgccatgctttcgacttgtggatgaaaagcctgatccccgccagcgttgaggtttatcacgacagcctgtgccgaaaaatctggcgtgaggatgataaatggcatgtcatttttcgtgcagacggctgggagcaacatattaccgcccgctatctggtcggtgccgatggcgcaaacagcatggtgcggcgacatctctacccggatcatcaaatccgtaaatatgtcgctatccagcagtggttcgcggagaaacatccggtgccgttctactcctgcatctttgataatagcataactaactgttatagttggagtatcagcaaagacggttattttatctttggcggtgcctatccaatgaaagacggtcagacgcgtttcacgacgctgaaagagaaaatgagcgcctttcagttccagtttggtaagacggtgaaaagcgaaaaatgcacggtgctgtttcccagccgctggcaggattttgtctgcggtaaggacaacgcctttctgattggtgaagcggcgggatttatcagcgccagcagcctggaggggattagctatgcgctggatagcacagacattctgcgtagcgtgttactgaagcagccagagaagctcaataccgcttactggcgcgccacccgcaaactgcgtttaaaactcttcggcaagatagtaaaaagccgatgcctgaccgcaccggctttaagaaagtggattatgcgcagtggtgtggcacatattccacagttgaaggattaaccaacgcgcttcacatcgcccaccagcaggatataagagagcgcgccaatcaacgcgacggcggagatataaaccagtgcaggtgcgaaaccgtaaccctgcgccaggtaccccaccaccagcggaacggtgatgccgcccagaccaccggcgaagttaaacacgccgccggttaaaccaatcaggcgcatcggtgccagagaagaaaccaggctccaggtaatgctagcaaaaccgttaccgaagaatgccagcgccatcaggcacataatcatcatcggatcgttagtgtagttagcgcccataatgcaggtggagatcagcaagccgcagataatcggcgttttacgcgcaaagcccagactaaagcccttacgtaccagcagatccgctacccagccagagagcaggacgccgacaaacgccgcgaggaatggcaccgtggtcataaagcctgctttcagcgccgtgattcctttttcctgggttaaatagttcgggaaccaggttaagaaaaaccacagtgtagaagccaccgcaaattgcccaagataaacgccgatcagtttacgatggaacaccagtttccagtctttggctgttaacggctgacgcgcctctttcttcaccggcgcatcaccatccaccagaccgccgccatcacgaatgtaatccagttcagctttgctgatacctttggtcaggcgcggcggctgataaaccttaaaccaaatcaggctccagataatgccgataccaccagtgacaatgaacacccagtgccagctcaacatctcctgaatccagatcagcagcggcgtcagaaacgccagaccgacaaactgaccagacgtataaaaaccaacggcagaagcgcgttcatgttccgggaaccagctggtcaccatccggttattggtcgggaaagcaggcgcttcgaaaataccggttatcgcgcgcagaccaattaaactcattaagcccgtggcaaagccctggaataaagtcgccacactccagccaaatatcgcaataaaataagtcacgcgagaacctacgcgatctaaaaaccaaccgccggggatctgacatagcgtataaagccaggcgaaggcgctaaatacatagcccatttccgctttggtaatgccgaactcttcctgaatatgggcggaagccacggccaggttggcgcggtcgacataacaaatgactaccgtaataaagatcatcaccagcgtcagataacgccgacgccccggctttgctgcattaacgggaatatccatagcgagctttctccagattttgggcatagcgaagccgctcaccatgccctgtaatttacagagggttatatttttgtattgctgttttagtgcccgatgaggggcttacgtggcaggaattaccactctgctacgctgttatcttcatgacgccagagcggattacgccagtccggggcatttttactgaactcaatcactttagcttcgtcgatttccacgcctaagcccggtttcgttaacggtttaaagaagccgccgaccatgctgaagtcttctttgtttttcacaaagtcgagtaactccgcgcctttgttgtaatgaattcccatactttgttcctgaagtacggcgttataggaaacaaagtcgatatgcaggcaagccgccagtgcaatcggtccgagcggacagtgcggcgcaagggtcacgtcataggcttctgccattccggcgattttgtagcattcggtaataccgcccgcgtgggagagatccggttgcagaatgctaataccacctgcctccagcacgcgtttaaaatcgaagcgactgaacatgcgttcacccgccgccagtggaatatgcgtttgtgccgccagtttcgggtagtattcggcttgttccgccagcaccggctcctcaataaacagcgggcgatacggctccagttctttaatcagcactttcgccatcggcgcgctgacgcgaccgtggaaatcaagaccaaactcaatctgattgccaaaagcttcacgaatttgtgccacggtgttaaccgccgcatctaccgcgcgggagttatcaattagccccagttcttcacaaccgttcagtttgaaggtatcgaagccgatttcgcgtagcgttttaatgccgtcgataacatccgccggacgatcgccgccaacccaactgtaggctttaattttgtcgcgaaccaggccgcccatcagttgccagaccggcgcattcagcactttacctttgatatcccataacgcctggtcaatcccggcgatggcgctcatcaggatcggaccgccgcgatagaatccggcgcgatacatcacttgccataagtcattgatgcggcttggatcctgaccaatcaaatagtcacccagctcgtgaactgccgcttccaccgtacgggcgcggccttcgatcacgggctcgccccaaccgaccacgccttcatcggtttcaattttcaggaacatccagcggggaggtaaacgatacgtggtaattttggtgattttcattgcactgcctctcgatacgccttaacaaatgctgctgcctgctgcgcggtgcgctctacggattgcccggcgcgatagagatcgctgcctaagcccgcccctgcacaacctgcgtctatccactgcgccaggttttctggcgtcacgccgccaacggcaaagactgcgatgtcgcttggcaataccgcttttaacgctttgatgtattgcggaccaaaagcgctactcggaaatattttcagcgcctgcgcgcccgcttcgagcgcggtaaaggcttcggtcgccgtcgcgcagccggggcagacggtcatgccgtagcccaccgcacggcggatcacttcactatggatattgggcgtaacgatgagctgacagcccatcctggcgagcgcatcgacctgttcaggtttcagtaccgtacctgcgccaatcaacgccttgtcgccgtacgcatcaacgatggcgggaatgctttgctcccattgtggggaattcagcgggatttcaaccgcgtcgaacccggcgtcaatcaccgcgccaacatgcgccagcgcctcgtcgggcgtaataccgcgcaaaatggcgatcagcgggagtttagtttgccactgcatgagcgatgctccttataccagcctgaaatgccgtgtcgcccgccaccgccgtcacgtcgcaacccatcgcctgaaaggcttgctggtagcgcgcggtcaggcttgttccggcgacaagggtgatggcgtgttgatgggccacatagtcgcgcatactggcgacctctgcgccaatcaacaaaccagagagaaattcgctgacctgttcgcggggaagtgttcccagcacatggctggcgcgaacttcaaaaagctgcggcaatatggcgggcgtattaagaccacgctcaaggccagctgtgaaggcatcggcagagttttcctgcggcggcaaacctgcgccaatcaaactgtgatttaacagtaaatgatgtaattcaccggtcatcacggtgcgaaaatcgttgatttgctggctatcggcctgcacccatttgcaatgggttccgggcatgacataaagagaggaaggagccagagctcgcgcgccgatcaattgtgtttcttcgccgcgcatcacattgtggttatcgtcatgagagacacataatccgggaataatccagatattgtcgccaacactcgttaattgttcgccaatagagctaaaacaggcaggaacagataaatacggtgcaactttccagccgacgttgctgccaaccattcctgccattaccactggcgttttctcttcacgccagtcggtcgtgacttctgctaacaccgcagccggagattttccgttcaggcgcgtgacgcctgcttcactttgcctgctctccaggcagtggtcgccctgataaagccaggcgcgcagattggtgcttccccagtcaattgcgatgtagcgagctgtcatgtgatttcctttaaccttcgtgtgctgctggcgatcatggtaagcgccgcctgctctgccgcatcgccgtcctgatgtcgtatcgcatcgaacagcgccttatgttcctggagcgtttgcggcatgttggcctcatcgcccatccaggttcgttcaaaaaccgcccgctgcaggctactgatcgcaatgctaagttgctgtaacaccgggttatgcacgctctgcagcaccgcctcgtggtagcgaatatccgcttcgttaaacgcttcgcggtcctgattgttggcaatcatctcgttcagcgcgctttcaatctgcgccagatcgctggaagtcgcgcgctctgctgcccaacgggcaatcgccggttccaccagatttcgcacttcgctcatggcactgataagccgtgggtcgtagtcattttccagcacccattgcagtacgtcagtgtcgaggtaattccactggttacgcggtgccacaaacgccccgcgataacgtttcatttcaatcagccgcttcgccatcaggctacggaacacctcacggatgatgttgcggctggttgcaaactcctcacagagttccgcctcagccggaagcgggctgcctggcacgtatttgccgtgaacgatctgtttacccagcgtaatgacaatgcgatcggttttattgagagtcatggagagtccttgtgctctgtatgttcttctctactttaccccgatcgatgcataacgcggcaactttgtagtaccagcgtgatgacgttcgcgtttgccgtgcgtgtaatgtagtacaaacttatattgttgtactacaatttagatcacaaaaagaacaatgcataaaaaaatgacatgcgtcgggcagaaatctgaaaagggatatcaggcgctaaacaggagggaaagaagagtatgctttcaacggcttagctactcgtttaaaggattaatcatgaagttgaattttaagggattttttaaggctgccggtttattcccactggcgctgatgcttagtggctgtatcagctatgctctggtttcccataccgcaaagggtagtagtggaaagtatcaaagccagagtgacaccatcactgggctaagccaggcaaaagatagtaatggaacaaaaggctatgtttttgtaggggaaagcctggattaccttatcactgatggtgccgatgacatcgttaagatgctcaatgatccagcacttaaccggcacaatattcaggttgccgatgacgcaagatttgttttaaatgcggggaaaaagaaatttaccggcacaataagcctttactactactggaataacgaagaagaaaaggcactggcaacgcattatggttttgcctgtggtgttcaacactgtaccaggagtctggaaaacctaaaaggcacaatccatgagaaaaataaaaacatggattacagtaaggtgatggcgttctaccatccatttaaagtgcgattttatgaatactatagtcccagaggcattccggatggtgtttccgcagcattactgccagtgactgttacgctggacatcattactgcaccgctgcaatttctggttgtatatgcagtaaaccaataatcagtaagcgggcaaacgcgtttatgctgtttgcccgcccacagattaattcagcacatacttctcaatagcaaacgccacgccatcttcaaggttagatttggtgacaaagttcgccacttctttcacactaggaatagcgttatccatcgccacaccgacgcctgcatattcaatcattgcgatatcgttttcctgatcgccaatcgccatgatttcttccggtttaatacctaacacgtcggccagacttttcacccccgtacctttgttaacgcgtttatcgaggatttcgaggaagtacggcgcacttttcagcacggtatatttctctttcacttcctgcggaatacgcgcgatagcctggtcgaggatggcgggttcatcaatcatcatcactttcaggaactgggtattggggtccattttctccgcttcgcagaacaccagcggaatggtggcaacgaaggattcatgcaccgtgtagtagctgatatcacggttggcggtgtacagcgtggtgcggtccagggcgtggaaatgagaaccgacttcgcgagagagtttttccaggaaacgatagtcgtcatagctgagagcagtttgcgccacggtgctaccatcagcggccttctgtaccagcgcgccgttataagtaatgcagtagtcgcccggctgttccatatgcagctctttcaggtagttgtgcacacctgcatacgggcgacccgtcgttagcacgacattcacgccacgggcgcgagctgcggcaatcgcatttttaacggcgggactaatggtgtgatcgggcagcagaagggtgccatccatatcgatagcaatgagtttaatagccatgagttccccaggtagattggttcctgacccatgctaacgcgattccgctcaaaaatcagtacaacacccgagggaaaagggggatgcaacgcgcgttgcgtgctccctttttgcttagcggaagagtttccctttcagcagttccatgcctgcggaaagcagatcgttattggcttgtggactcacttcaccttgcggactgagcgcatcaataatcttcggcaattgttctgccagtaaactggaagctgtactggtatccacgccaagtttttgcccgagatcggacaccgcatttgtgccgagcgcgctttccagttgctcgccactaacgctttgattgccctgttgattactcagccaggtactgagaatggcccctaagccgccactttgcagtttttccagcagcacctgaatgccgccctgctcctcaacccaacttaaaatagcctgatatttccccgcatcgcctttcagaaaggcaccgacaacttcatcaaaaagccccatgataatcacctgtaaagcgttacgtgttgacccaaaaagtatagatttgcgggatgataattgcggattgcagaaataaaaagggcggagatgatctccgcccttttcttatagcttcttgccggatgcggcgtgaacgccttatccggcctacaaaatcatgaaaattcaatacattgcaagattttcgtaggcctgataagcgtagcgcatcaggcacgctcgcatggttagcgccattaaatatcgatattcgccgctttcagggcgttctcttcaataaacgcacggcgcggttcaacggcgtcgcccatcagcgtggtgaacaactggtcggcagcaatcgcatctttaacggtaacgcgcagcatacgacgactttccgggtccatagtggtttcccacagctgttccgggttcatctcgcccagacctttataacgctggatggagaggccgcgacgggactctttcaccagccagtccagcgcctgctcgaagctggctaccggctgacgacgctcgccacgttcgataaacgcatcttcttccagcaagccacgcagtttctcacccagcgtgcagatacgacgatattcgccaccggtgataaactcgtgatccagcggatagtcagtatccacaccgtgggtacgcacgcgaacaatcggctcgaacaggttttgctcagcattggtgtgaacatcaaacttccactggctgccgtgctgttctttgtcgttcagttcgctgaccagcgcgttcacccagcgggtaacggtctgctcatcagaaaggtcagcttccgtcaacgtcggctgatagataagctctttcagcattgctttcggataacgacgctccatacgattgatcattttctgcgtcgcgttgtactcagataccagtttctctaacgcttcgccagccaatgccggtgcactggcgttggtgtgcagcgttgcgccgtccagcgcgatagagatctggtactgatccatcgcttcgtcgtctttaatgtactgttcctgcttgcctttcttcactttgtacagcggcggctgagcgatgtagacgtgaccgcgttcaacgatttccggcatctgacgatagaagaaggtcaacagcagcgtacgaatgtggctgccgtcgacgtccgcatcggtcatgatgatgatgctgtgataacgcagtttgtccgggttgtactcgtcacgaccgataccacagccaagcgcggtgataagcgtcgccacttcctgagaagagagcatcttatcgaagcgcgctttctcgacgttgaggattttacccttcagcggcagaatcgcctggttcttgcggttacgcccctgcttcgcagagccgcccgcggagtccccttccaccaggtacagttcggaaagcgccggatcgcgttcctggcagtctgccagtttgcccggcaggcccgctaagtcgagcgcacctttacggcgggtcatttcacgcgcgcgacgcgccgcttcacgggcacgggcagcatcgataattttgccaaccacgattttcgcgtcggttgggttttccagcaggtattctgccagcagttcgttcatctgctgttcaaccgcgcttttcacctcagaagaaaccagtttgtctttggtctgggaggagaatttcgggtccggcactttcacggaaacgaccgcaatcaggccttcacgcgcatcgtcaccggtggcgctgactttggcttttttgctgtagccttctttgtccatgtaggcgttcagggtacgggtcatcgccgcacggaagcctgccaggtgagtaccgccgtcacgctgcggaatgttgttggtaaagcagtagatgttttcctggaagccatcgttccactgcaacgccacttcgacgccaataccgtctttttcagtggagaagtagaagatattcgggtggatcggcgttttgttcttgttcagatattcaacgaacgccttgatgccgccttcatagtggaagtggtcttctttgccgtcgcgcttgtcgcgcagacgaatggaaacgccggagttgaggaagctcaactcacgcagacgtttcgccagaatttcatattcgaactcggtcacattggtgaaggtttcgaggctgggccagaaacgcaccatggtgccggttttttcagtctcgccggtaaccgccagcggggcctgcggtacaccgtgttcgtagatctgacggtgaattttaccctcgcgctggataaccagctccagtttttggctcagggcgtttactacgctaacaccaacgccgtgcagaccgccggacactttataggagttatcgtcaaatttaccgcctgcgtgcagaacggtcatgatcacttccgccgcgcttacgccctcttccgggtgaataccggtcggaatgccgcgcccgtcatcctgtacagagacagagttatcggcgtgaatggtgacgataatttctttacagtgacccgcgagcgcttcgtcgatagcgttatctaccacctcgaataccatgtggtgcagaccggtgccgtcatccgtgtcgccgatatacatacccgggcgcttacgcaccgcatccagccctttcaggactttgatactggaggagtcataagaattgctcatcaacgtttctcgctcatttatacttgggttaatccgttattttacccttttccacggtaaacatcttgctattttcgtcgctcatgtctataacgtgttcagcactgatcgcgctgacaaagacctgactttgcgtcgcttttaagcggctggcaagcagcccgcgacgctcatcatcaagctcagaggcaaaatcatctatcaggtagagacaccgccgcccgctttcacgggtgaggaactctccttgcgccagacgtaaggcgcacatcaacagcttaagctgcccacggcttaaggtatcttccaccggcgcaccgtcggcgcgaatgcgtaagtccgctttgtgcgggccgtgcgcggtgtaggttagctggcgatcgcgttcaaaattacgttccagcacctcagcatattctgtctctttctcccagccgcgctggaaagagaaagtcagagaaaactcagggagaaattgcttacaggtatcagccatatcggccgcgataccggcgctatactccgcgcgccaggtgctgatttgctccgccagcgggatcagctctttatcccacgggcgtagctgttcgtaacgtgtcacctggcgcagcgccgcattgcgctgcttgagcaatcgcttgagattgctccaggcggtgaaaaatccgggttcgttgtgaaagcatccccagtcgaggaatgctcttctgtatttggggccgccgttgagtaaagtaaacccttctggcgttatcaactgcattggcatcaggtgcgccagttccgcgaccttatgcccgtctgtaccgtcgatgcggactttgctgtcgccctgtttgtctttggttaagccaatcgctgtctcgcgctcttcgccctgtaatcgcccgtggagaacaaacgcctcctgctcatggcgaatgacgcgaccaatctgcaaactgcgaaacgcccgaccatggccgagcgtatagatggcttccagcacgctggttttgccactgccgttggcacctaccagaaagttaaagccgggagataaggcgagatccgcggtttcaatgttgcggaaatcgcggatcaacaagcgggtgagggacattacagtctcattggcatgacaacataagccgcgctctggctggccgcatcttcaatctgcacgctggaaacgctatcggtcagcatcatgcggacgttttcgcatttcagcgcgttcagaacatccagcacataactgacgttgaagccgatttccatctccgcaccgctataggtaacgtcgaggatctcttccgcttcttcctgttccgggttgttggcggtgattttcagctggttttcgctgacataaagacgtacgccgcggaatttctcgttagagagaatcgccgcgcgagcaaacgcctgcttgagcagatcgcagccagcttccagatgtttgtccgggttcttcggcagaacgcggcgataatccgggaagcgaccatccaccagtttggaggtgaagataaagtcgccaacgtgggcgcgaatgttgttgctgccaatctgtacgcgcagcggattgtcgccgccgtcgagcatacgcatcagttcaatcacgcctttacgcggtacgatcacgctatggcttggcaaagattgaccaattggcatactacagaccgccagacggtggccgtcggttgccacggtgcgcagttcttcaccttcggtttcaaacagcataccatttaagtaatagcgaacgtcctgatgcgccatagaaaactgggtcgcttcaatcagacgcttcatcgttgcctgcggcagggtaaattcgacttcactctgccagtcatcgaggttcgggaaatccgccgctggcagggtagacaggctaaaacggctacgcccggagcgtaccagcatccgttcaccttccagctgcacggcaatttccgcgccttcaggcagaccacggcagatatcaaagaatttgcgcgccggaacggtcgtcgctcctggctcgtgtggctgaaccagcgcaacacgtgccaccatttccatctcgagatcagtaccggtcaggctcaacgtaccgtcagcaacctgtaacagcagattaccgagaatcggtagcgtaggacgaccacctaacggaccgctcacctgttgtagcggttttaataaatgctcacgttctacggtaaatttcataggtttagctactcaatgttctgattaaattactaaaatcttctttgatatcgtggctctcttcacgcaactgctcgatcttacggcaggcatgaagcaccgtcgtgtggtcacggccaccaaacgcatcgccaatctccggcagactgtggttagtcagctctttcgccagcgccatcgccatctggcgcggacgcgccacgctgcgggatcgacgcttggaaaggagatccgcgactttgatcttgtagtactccgccaccgtcttctgaatattgtcgatggtgaccagtttttcctgcaatgccagcaagtcgcgcagcgcctcacgcacgaagtcgatggtgatcgcccgtccggtaaagttggcattggcaatgacgcggttcagcgccccttccagctcacgtacgttagatcgtagacgcttggcgataaagaacgccacttcgcccggcaaacgaatgtcgttttcgtcggcctttttcatcaggatcgccacacgggtttccagctctggcggttcgatcgccacagtcagtccccaaccgaagcgggatttcaaacgatcctcaacgccgttgatctctttcggatagcgatcgctggtgagaatgatctgttgattaccttccagcagggcgttgaaggtgtggaaaaactcttcctgagatcgttctttattagcaaaaaactgaatatcgtcgatcagcagtgcatctacggaacggtagtagcgtttaaactcttcgatcgcgttgttttgcagggctttaaccatgtcctgaacaaagcgctcggagtgcatataaaccactttggcattcggcttgcgcgccataatgccgttacccaccgcatgcagcaggtgagttttacccagacccgtgccgccataaaggaacaacgggttataggcaccgccagggttatccgccacctggcgagccgccgcgcgcgccagttggttagatttaccttcaacgaagttatcaaacgtgtgtttgacgtttacgttagaacgataggtcggttctgccggggccgggacgttatcccaaccactgcgcgtagaaggcgcagcacgttgcggctgcgtttgcgccacctgtgcaggggccgcgacgttgctcgtcactgccgcttgtggcgtttgcgtcaccggtttggtgccgacttcaaaacgcagctgtggggcatccgctccgcagaaactggttagcagtccattgatattattaaggtacttgtcccgtacccaatcgaggacaaaacggtttggcgcgtacagggccagcgtgttatcgctcagttccgcctgcaatgggcgtatccacatactgaattctgtggctggtaactcatcctgcaatcgggcaagacactgctgccaaaggctaagactcacggcggactccactcgaacaaaagtcgataatgactaaggctgaaacattcatgattgttgacgtacgtcgaaaagaccctgcttgagggtgacgcacgaaccgctgtctgcggttatatgcccgatcaagatcctgcaaaacgatcgggaccgcggatcatagcctaaactgcgcaagagatcttctgtttctcacagattttcccgatttatccacaggactttccagaactcgctaagtgtaaacgatcctgccgcgaggcgggcacgatttacgccgcatattggaaaatttaatgaccatagacaaaaattggcttaatcgatctaataaagatccaggacgatccttgcgctttacccatcagcccgtataatcctccacccggcgcgccatgctggtttccactggtgtgaggtcgtacattttccctgcgaaaaggtgcggaaaagcgcggtaaataaggaaagagaattgactccggagtgtacaattattacaatccggcctctttaatcacccatggcttcggtgtccatcgtttcatttttcggcggatatccaataaagccattgaatttattcaagtttaggtagaaatcgccatgaaacgcacttttcaaccgtctgtactgaagcgcaaccgttctcacggcttccgtgctcgtatggctactaaaaatggtcgtcaggttctggcacgtcgtcgtgctaaaggccgcgctcgtctgaccgtttctaagtaataaagctaacccctgagtggttaagctcgcatttcccagggagttacgcttgttaactcccagtcaattcacattcgtcttccagcagccacaacgggctggcacgccgcaaattaccattctcggccgcctgaatagcctggggcatccccgtatcggtcttacagtcgccaagaaaaacgttcgacgcgcccatgaacgcaatcggattaaacgtctgacgcgtgaaagcttccgtctgcgccaacatgaactcccggctatggatttcgtggtggtggcgaaaaaaggggttgccgacctcgataaccgtgctctcagcgaagcgttggaaaaattatggcgccgccactgtcgcctggctcgcgggtcctgacttaatcggaagcgttggaaaaattatggcgccgccactgagccctggcagccgggtcctgatagccctcattcgggtctatcaacgcctgattagtccgctactcgggccgcattgtcgtttcactccaacctgtagtagctacggaattgaggcattgcgcaggtttggagtgataaaaggcagttggttgacggtgaaacgcgtattaaaatgccaccctttacaccctggtggtgacgatcccgtcccgcccggaccatttgataccagagaacactaacgatggatagccaacgcaatcttttagtcatcgctttgctgttcgtgtctttcatgatctggcaagcctgggagcaggataaaaacccgcaacctcaggcccaacagaccacgcagacaacgaccaccgcagcgggtagcgccgccgaccagggcgtaccggccagtggccaggggaaactgatcagcgttaagaccgacgtgcttgatctgaccatcaacacccgtggtggtgatgttgagcaagctctgctgcctgcttacccgaaagagctgaactctacccagccgttccagctgttggaaactagtccgcagtttatttatcaggcacagagcggtctgaccggtcgtgatggcccggataacccggctaacggcccgcgtccgctgtataacgttgaaaaagacgcttatgtgctggctgaaggtcaaaacgaactgcaggtgccgatgacgtataccgacgcggcaggcaacacgtttaccaaaacgtttgtcctgaaacgtggtgattacgctgtcaacgtcaactacaacgtgcagaacgctggcgagaaaccgctggaaatctccagctttggtcagttgaagcaatccatcactctgccaccgcatctcgataccggaagcagcaacttcgcactgcacaccttccgtggcgcggcgtactccacgcctgacgagaagtatgagaaatacaagttcgataccattgccgataacgaaaacctgaacatctctagcaaaggtggttgggtggcgatgctgcaacagtatttcgcgacggcgtggatcccgcataacgacggtaccaacaacttctataccgctaatctgggtaacggcatcgccgctatcggctataaatctcagccggtactggttcagcctggtcagactggcgcgatgaacagcaccctgtgggttggcccggaaatccaggacaaaatggcagctgttgctccgcacctggatctgaccgttgattacggttggttgtggttcatctctcagccgctgttcaaactgctgaaatggatccatagctttgtgggtaactggggcttctccattatcatcatcacctttatcgttcgtggcatcatgtacccgctgaccaaagcgcagtacacctccatggcgaagatgcgtatgttgcagccgaagattcaggcaatgcgtgagcgtctgggcgatgacaaacagcgtatcagccaggaaatgatggcgctgtacaaagctgagaaggttaacccgctgggcggctgcttcccgctgctgatccagatgccaatcttcctggcgttgtactacatgctgatgggttccgttgaactgcgtcaggcaccgtttgcactgtggatccacgacctgagcgcacaggacccgtactacatcctgccgatcctgatgggcgtaacgatgttcttcattcagaagatgagcccgaccacagtgaccgacccgatgcagcagaagatcatgacctttatgccggtcatcttcaccgtgttcttcctgtggttcccgagtggtctggtgctgtactatatcgtcagcaacctggtaaccattattcagcagcagctgatttaccgtggtctggaaaaacgtggcctgcatagccgcgagaagaaaaaatcctgattcggtgagttttcgctaaaataagggcggtcagttgaccgccttttttcttttcgtagggcggataagcaccgcgcatccgccacacaaagcaacaggaacatcatgagcgataatgacactatcgtagcccaggccacgcctccgggacgtggcggcgttggcatcctgcgcatctccggcttcaaagcccgtgaagttgccgaaaccgtgctgggtaaactgcctaagccgcgctacgccgattatcttccgtttaaagacgccgacggcagcgtgctcgatcaggggattgcgctatggttccctggcccgaacagcttcaccggcgaagatgtgctggaactgcaaggtcatggcggtccggtgatcctcgacctgctgttaaaacgcattctgaccattcccggcctgcggattgctcgccctggtgagttttccgaacgcgcgtttcttaacgataaacttgacttagcccaggccgaggcgattgccgatcttatcgacgccagtagcgaacaggcggcccgtagcgcacttaacagcctgcaaggcgcattctccgcacgggttaatcatctggtagaagccctcacccacttgcgcatttacgtcgaagcggcaattgatttccccgatgaagagatcgatttcctctccgacggaaaaattgaagcccagctcaatgacgttattgccgatcttgatgcagtgcgtgctgaagcacgtcagggtagtttgttgcgcgaagggatgaaagtggtgattgccggacgtcctaacgccggtaaaagcagcctgttaaacgcgctggcggggcgtgaagcggcaatcgtaaccgatatcgccggaactacgcgtgacgtgctgcgtgagcatatccacattgacggaatgccgctgcatatcatcgataccgccgggctacgtgaagccagtgacgaagtagaacgtattggtatcgagcgcgcgtggcaggaaattgaacaggccgaccgcgtgctgtttatggtcgatggcaccacaacagacgccgtggatccggcagagatctggccggaatttattgcccgtctgccagcgaaactgccgatcaccgtggtgcgcaataaagccgatatcaccggcgaaacgctgggaatgagtgaagtgaacggtcacgcgttaattcgtctcagcgcaaggactggtgaaggcgtggacgtgctgcgtaaccatctcaaacagagcatgggctttgacaccaacatggaaggcggcttcctggcgcgtcgtcgccacctacaggcgctggaacaggcagcggaacatctacaacagggcaaagcgcaactgttgggagcctgggcaggtgaactgctggcggaagagttgcgtctggcacagcagaacttaagcgaaatcaccggggaatttactagtgacgacctgctggggcggattttctccagcttctgtattggtaagtaaccgcgcttacgaagccgcattctgactgtcagatgcggcttcgcttcattgttaccactcctgttattcctcaaccctttttttaaacattaaaattcttacgtaatttataatctttaaaaaaagcatttaatattgctccccgaacgattgtgattcgattcacatttaaacaatttcagaatagacaaaaactctgagtgtaataatgtagcctcgtgtcttgcgaggataagtgcattatgaatatcttacatatatgtgtgaccagtaaatggttcaatattgacaacaaaattgtcgatcaccgcccttgatttgcccttctgtagccatcaccagagccaaaccgattagattcaatgtgatctatttgtttgctatatcttaattttgccttttgcaaaggtcatctctcgtttatttacttgttttagtaaatgatggtgcttgcatatatatctggcgaattaatcggtatagcagatgtaatattcacagggatcactgtaattaaaataaatgaaggattatgtaatggaaaactttaaacatctccctgaaccgttccgcattcgtgttattgagccagtaaaacgtaccactcgcgcttatcgtgaagaggcaattattaaatccggtatgaacccgttcctgctggatagcgaagatgtttttatcgatttactgaccgacagcggcaccggggcggtgacgcagagcatgcaggctgcgatgatgcgcggcgacgaagcctacagcggcagtcgtagctactatgcgttagccgagagtgtgaaaaatatctttggttatcaatacaccattccgactcaccagggccgtggcgcagagcaaatctatattccggtactgattaaaaaacgcgagcaggaaaaaggcctggatcgcagcaaaatggtggcgttctctaactatttctttgataccacgcagggccatagccagatcaacggctgtaccgtgcgtaacgtctatatcaaagaagccttcgatacgggcgtgcgttacgactttaaaggcaactttgaccttgagggattagaacgcggtattgaagaagttggtccgaataacgtgccgtatatcgttgcaaccatcaccagtaactctgcaggtggtcagccggttagtctggcaaacttaaaagcgatgtacagcatcgcgaagaaatacgatattccggtggtaatggactccgcgcgctttgctgaaaacgcctatttcatcaagcagcgtgaagcagaatacaaagactggaccatcgagcagatcacccgcgaaacctacaaatatgccgatatgctggcgatgtccgccaagaaagatgcgatggtgccgatgggcggcctgctgtgcatgaaagacgacagcttctttgatgtgtacaccgagtgcagaaccctttgcgtggtgcaggaaggcttcccgacatatggcggcctggaaggcggcgcgatggagcgtctggcggtaggtctgtatgacggcatgaatctcgactggctggcttatcgtatcgcgcaggtacagtatctggtcgatggtctggaagagattggcgttgtctgccagcaggcgggcggtcacgcggcattcgttgatgccggtaaactgttgccgcatatcccggcagaccagttcccggcacaggcgctggcctgcgagctgtataaagtcgccggtatccgtgcggtagaaattggctctttcctgttaggccgcgatccgaaaaccggtaaacaactgccatgcccggctgaactgctgcgtttaaccattccgcgcgcaacatatactcaaacacatatggacttcattattgaagcctttaaacatgtgaaagagaacgcggcgaatattaaaggattaacctttacgtacgaaccgaaagtattgcgtcacttcaccgcaaaacttaaagaagtttaattaatactacagagtggctataaggatgttagccactctcttaccctacatcctcaataacaaaaatagccttcctctaaaggtggcatcatgactgatcaagctgaaaaaaagcactctgcattttggggtgttatggttatagcaggtacagtaattggtggaggtatgtttgctttacctgttgatcttgccggtgcctggtttttctggggtgcctttatccttatcattgcctggtttagtatgcttcattccgggttattgttattagaagcaaatttaaattatcccgtcggctccagttttaacaccatcaccaaagatttaatcggtaacacctggaacattatcagcggtattaccgttgccttcgttctctatatcctcacttatgcctatatctctgctaatggtgcgatcattagtgaaacgataagtatgaatttgggttatcacgctaatccacgtattgtcgggatctgcacagccattttcgttgccagcgtattgtggttaagtagcttagccgccagtcgtattaccagtttgttcctcgggctgaagattatctcctttgtgatcgtgtttggttcttttttcttccaggtcgattactccattctgcgcgacgccaccagctccactgcgggaacgtcttacttcccgtatatctttatggctttgccggtgtgtctggcgagttttggtttccacggcaatattcccagcctgattatttgctatggaaaacgcaaagataagttaatcaaaagcgtggtatttggtagcctgctggcgctggtgatttatctcttctggctctattgcaccatggggaatattccgcgagaaagctttaaggcgattatctccagtggcggcaacgttgatagcctggtgaaaagcttcctcggcaccaaacagcacggcattatcgagttttgcctgctggtgttctctaacttagctgttgccagtagcttctttggtgtcacgctggggttgttcgattatctggcggacctgtttaagattgataactcccacggcgggcgtttcaaaaccgtgctgttaaccttcctgccacctgcgttgttgtatctgatcttcccgaacggctttatttacgggatcggcggtgccgggctgtgcgccaccatctgggcggtcattattcccgcagtgcttgcaatcaaagctcgcaagaagtttcccaatcagatgttcacggtctggggcggcaatcttattccggcgattgtcattctctttggtataaccgtgattttgtgctggttcggcaacgtctttaacgtgttacctaaatttggctaaatccttcaagaagccagccattcgctggcttcttgcctctcaggaaatcacttatgtccaaatggcaactcgcctgatcctccttcaccacgtatgctttgcgtcaccttactatcaggacgctttagcccatgtcccgctttttgatttgtagttttgccctggttttactttatcccgccgggattgatatgtacctcgttggtttaccgcgcatcgccgccgatctcaatgccagcgaagcgcagttgcatattgcgttctccgtatatctggcggggatggcagctgcgatgttatttgccggtaaagtggccgatcgtagtgggagaaagccggtcgccatacccggcgcggcgctatttattattgccagcgtgttctgtagtctggctgaaaccagcacgttatttcttgcaggccgatttctacaggggttgggcgcaggctgttgttacgtagtggcgttcgctattttgcgcgacacgctggatgatcgacgtcgggctaaagtgctgagtttactcaacggtattacctgcatcattccggtgttagcgccagtgctcggacatctgattatgcttaaattcccgtggcagagtctgttctgggcgatggcaatgatgggcatcgcggtactgatgttgtctttgtttattttaaaagaaacgcgcccagcggcccccgcagctagcgataaaccacgagaaaatagcgagagcctgcttaaccgttttttcctcagccgtgttgttatcaccaccctcagcgttagcgtgatcctcactttcgtcaacacgagtccggtattgctgatggaaatcatggggtttgagcgcggtgaatacgccaccattatggcgctgaccgctggcgtcagcatgaccgttagtttctccacgccatttgcgctgggaatttttaagccacgtacgttgatgatcaccagccaggtgttattcctggcggcggggatcactcttgccgttagtccttcccatgcggtttctctgtttggtatcacgctgatttgcgccggtttcagcgtaggttttggtgtggcgatgagtcaggcgttagggccgtttagtttacgcgcgggcgtagccagcagcaccttaggtattgcgcaggtttgcggtagcagtctgtggatttggctggcagcggtggttggtatcggcgcatggaatatgctgatcgggattctgattgcctgtagcatagtgagcctgttgctgattatgttcgtcgcgcctggacgccccgttgccgctcatgaagaaatccatcaccacgcttgatctcaatctgctgctttgtctgcaactgctgatgcaggagcgcagcgtaaccaaagcggcgaagcggataaacgtgacacctagcgcggtgagtaagagcctggcaaagttaagagcgtggtttgacgacccgctctttgtgaacagtccgctgggtctgagccccacaccgctgatggtcagcatggagcaaaatctggcggagtggatgcaaatgagcaacctgctgctggataaaccgcaccaccagacaccgcgcggcctgaagtttgagctggcggcggaaagtccgctgatgatgatcatgcttaatgcgctgagcaaacagatctaccaacgttacccgcaggcgaccatcaaattacgtaactgggattacgattccttagatgccattactcgtggtgaagtggatatcggtttttccggtcgcgaaagccatcctcgcagccgggagctgttaagcagcctaccgttagccattgattatgaagtgctgtttagtgatgtgccctgcgtctggttacgcaaagatcatccggcactgcatcaaacgtggaatctggacaccttcttacgttatccgcatatcagcatttgctgggaacagagcgatacctgggcgctggacaatgtgttacaggagctgggacgcgaacgcacgattgctatgagcctgccggaattcgagcagagtctgtttatggcagcgcaacccgacaatctgctactggcgaccgcgccgcgctactgtcagtactacaatcaactccatcaactgccgttggttgctcttcctctcccgtttgacgaaagccagcaaaaaaagctggaagttccttttaccctgctgtggcataaacggaacagccataatccgaagatcgtctggttacgggaaaccattaaaaacctttacgcgagcatggcataaccgaatcgtatgaaacgcgacccaatttcacaataaaatgtaaaaaagttgtaataagcttgtctgaatcgaacttttagccgctttagtctgtccatcattccagtaaatgattactcttgtattcataatggaccattaagcatggagcgaaaaatggcgactcactttgcccgagggattttaacggaaggacatctgatttctgttcgtctcccctcccagtgtcatcaagaagcccgaaacattccccctcatcgtcaaagccgttttctggcgtccagaggtttactcgcagaactgatgttcatgctgtatggcattggcgaattgccggaaatcgtcaccctgccgaaaggtaaaccggttttcagtgataaaaatttgcctagcttttccatttcctatgccgggaatatggttggcgtggcgttaacaaccgaaggtgaatgtggcctcgatatggaactacagcgtgcgacgcgcgggtttcatagcccacacgcgcccgataaccacaccttttccagcaatgaaagcctatggatcagtaaacaaaacgatcctaacgaagcgcgggcgcagctcatcacgctgcgccgaagcgtgctaaaactaaccggtgatgttttgaatgacgatccgcgcgatctgcagctgctgcccattgccggacgcctgaaatgtgctcatgtaaatcatgtagaagcgttatgcgacgcggaagacgtgctggtgtggtccgtggcggtcacgcccacgattgaaaagctcagtgtctgggagttagatggcaaacacggctggaaaagcctgccggatattcacagccgcgccaacaatcctaccagccggatgatgcgttttgcccaactctctaccgtgaaggcttttagcccaaattgatagacaaccacaggagtcatcatgtctgaaaaattgcaggtggttacgttactggggagcctgcgcaaaggcagttttaatggcatggttgcacgtaccctgccgaaaattgctccggcgagcatggaagtcaatgcgttaccatccattgccgacattcccttgtatgacgctgacgtacagcaggaagaaggttttccagcaacggttgaagctctggcggaacagatccgtcaggctgacggtgtggtgatcgtcacgccggaatataactacagcgtaccgggtgggctgaaaaatgccatcgactggctttcccgcctgccggatcaaccgctggccggtaaaccggtattgattcagaccagcagtatgggcgtgattggcggcgcgcgctgtcagtatcacctgcgccagattctggttttcctcgatgcaatggtgatgaacaagccggaatttatgggcggcgtgattcagaacaaagttgatccgcaaaccggagaagtgattgatcagggtacgctggaccacctgaccgggcaattgaccgcatttggtgagtttattcagcgagttaagatctaaataaaaaacccgccagcaatcatgcatggcgggtttttaacgcgctatcgattttagtgagcgtcgataaagacaatcttcaggataaacagcagcgcaacgatgattacgcacgggcttagatcacgcagacgtccggtaccgattttcatcacgcagtaggagataaagcccagcgcgataccttcggtaatgctgaagctgaacggcatcatcacggcggtaataaacgccggaacagattcagtaagatcctgccagttcacgcgtgccagactggaagtcatcagcacgccaacgtaaatcagcgcaccagctgcagcgtagcctggcaccatccccgccagcgggctcagaaagataaccagcaggaacagcagaccaacaaccactgccgtcagaccggtacgaccgccaacgcttacgccggaagaggactcaatataagccgtaacggaagaagtaccgataaagctaccggtcacggaagagatactgtcgacatacagcgcctgcttcatgcgcgggaatttccccttctcatccgccagacctgctttatcggtcacgccaatcagcgtaccggaggagtcaaacaagttgaccaacatgaaagagaaaatcacccctgccagcccgaggttaaagctcccggctaaatctacatgacccacaactgtcattacgctcggcggcgcagaaacgatgccattgtagtgcacatcacccagcatccagcccagcagcgtcgtcaccacgatagaaaccagcaccgctgcgtgaatgttgcggctggccagaatagcaatgatgaagaagccgaggatacccagaagtacgctgtgagaagtcagattaccgatgctcaccagcgtttccgggttagcgacaatcacacctgcgtttttcagccccatcatgccaatgaacagaccgataccgctggtaatacccacacgcagactcaccggaatgttggctatcatccagtagcgaacgcggaaaatcgtcagtaacagcagacctatcgcgccccagaagattgcgcccatcccgacctgccacggcaagcccatcgcctgtacaacgacaaaagcgaagaacgcattcaggcccatagcgggtgccagtgcaactggcaggttagcaaacagtcccatcataatactgccgaatgcagcgatcagacaggtagtgacgaagacggcgctggtatccatgccagcaacgccaagaatttgcgggttaacaaaaacgatgtaaaccatcgtcaggaaggtggtaaaaccggcgatcacttcggtccgtgccgtcgtgccatgttcgcgcagtttaaacacgcgttccagcatcccctgaccagaagtctgggtggtatgttgatgactcattatctatttccgaacaaggagggaaaatccgtcgctatcgtataccaaaatgcgacaataggcgcgtttgtgagagacttttttattggatttacttatacggcaacgattgcgttgcgcaaatcggctctacgaaaacgttaaactgattaaaaaggaaaggcatgtcccggatagaagcggtatttttcgactgcgacggtacgctggtcgacagtgaagtcatttgctctcgcgcatatgtaacgatgtttcaggaatttggtattacgctcgatcctgaagaggtattcaaacgtttcaaaggtgtaaaactgtacgaaattatcgatattgtttcccttgaacatggtgttacgttagcgaaaacagaagctgaacacgtttaccgtgcagaagtcgctcggctgttcgatagtgaactggaagccatcgaaggggctggagcgctcctgagtgcgatcactgcgccaatgtgtgtggtatctaacggcccaaataacaaaatgcagcattctatgggcaagctgaatatgttgcactacttcccggataaactgttcagcggctacgatattcagcgctggaagccagacccggcgttaatgttccatgcggcaaaagcgatgaatgtaaatgtagaaaactgcattctggttgatgacagtgttgccggtgcacaatctggtatcgacgcaggtatggaagtgttctacttctgcgccgacccgcacaataagccgatcgttcacccgaaagtcaccacctttacccatcttagccagttacctgaactgtggaaagcgcgtggttgggatattacggcataattcttcacactcccttcacttaccccgcttaaattggcgctcaaaggtaagtaaagggagtttgatatgtctgttagtcgtcgggtaatacatcacggactttattttgcagttttaggaccgttaattggtgttctgtttcttgtcctctacatattcttcgcaaaagaaccgctggttctttgggtgataatacatccaatttttctcttattgagcataactacgggagctattcctgcgttgttaaccggtgtaatggttgcctgtctgccggaaaagatcgggagtcagaaacgttatcgttgtctggctggtggcataggtggcgtcgttatcaccgagatctattgtgcagttattgtacatattaagggcatggcttccagcgagttgtttgaaaacattctttctggtgacagtctcgttgtccgcatcattcctgcattgctggcaggtgtggtgatgagcagaatcattacccgtctacccggattggatattagttgtcctgaaacagactctttaagttaagcgggatactttatctttgggctactcaaaagcagacaggatgtttctatgactcaaaatatcaggccgttaccccaattcaaatatcatcccaagccactggaaacaggcgcatttgaacaggataaaaccgtagagtgcgattgctgtgaacaacagacgagtgtttattacagcggtcccttttattgcgttgatgaagttgaacatctctgtccgtggtgtattgcggacggttctgctgctgaaaagtttgcaggtagttttcaggatgatgccagcatagaaggtgttgaatttgagtatgatgaagaggacgaatttgccggtattaagaacacatatcctgatgaaatgctgaaagagttggttgaacgcacgccaggttatcatggatggcagcaggaattctggctcgcgcattgtggcgatttctgtgtttttatcggctatgtgggctggaatgatataaaagatcgcctcgatgaatttgccaaccttgaagaagattgtgagaatttcggtattagaaattctgatctagctaaatgcctgcaaaagggtggtcattgtcagggttatctcttccgctgtctccactgcggcaagctgagactgtggggtgattttagctaattatttaaataatgagaacaggccggagcgtaattcacacatccggccttatttcttaagcttaaccgagtgctaattctgcggcagcggctttatcagcgattaccatcaggctaggatgcagctgcaacacggaagctggaacatcttcggtaaccggaccttgcagaacatttttcagtgcctgcgctttacccgcgccgctgacaattatcagcaagtttttcgccgccatgatgcttttcggccccatcgtcacgtagctgtcaggcactaagctaaagtcgccgcccaactcgccatgcgccacaatatcaaccatctctccctggatcgggaactccacggtttgctcatggaaatgggtcgtattcggcaaattgccacaaaaatgaccatctgcacctaatcccagcaccaccaaatccagtccgccttcacgcgccagtttctgatcatgctcgcggtagttatcaatagtgagcttctggatattctcttctttgatccccgcaggggtgaaaaacagattacgcagattggtaatcgttacgccttctccctctttgccgcgaaatggaatttcatcaaaattatagaaatagcagttatcgtaccagggcttacctttaaccagggtggtgaggtattcatacatgcctttgggcgtgctaccggcggtaattgccaggttaacacgacgcgtcttgctcatataaccaagcagatggtgtgccgcgacacggctcatttcctggtaatcttcggtaatgattaatttcatcttaatgccttattttatttaaataatttctgtacaaaggctgcataggctggtcgccagacatccatttcatggttcagacccggatattcctggtaatcaaagttaatttttttctgctcaagctcagttttcagcccggcgatatccttgccggttacgacatctttatcccccacaaccacagtaaaattacgtagttgctggttgatagctgccggatcgttcagtcgggccgcgacaccttcatccggtacggttgtcgtggtaacaccactgaatgtggccagccagccaaagctttccagatgattcattccggaaaccagcgcctggtacccgccttgactaagccctgccagcgcgcggccatcggcatctttacggacattaaaacgcttgctaatcagcgggataatatcgttcatcagttcgcgatctgccgctttagcattcagcggataaaagactttacgtctttcctgaggcacgaaatcttcgggaataatgcccttcgcatcggtttctgtatccgggatcaccaccagcatcggtttaattttcccttcagcaagcaggttatccatgatttgcgggatacgcccctgatcgatagcggaacgtccggtatcaccaaagccgtgatagaaatagagcactggcaaaggctcgcccatgccggtgtatcctggcggggtccagacatacatctgacgttcagattgcaatgcgttggagtggtaagttatggcgatcaaatcaccatgcgcaacagaacgcgtatccagataactgcctggcaccagaatcatactggagttaacctggcgctgaggattagtcattgcggtgcctgtatcaatgctgcgtacaccatcaacattgaaaaaatactcgtacaggttgcctttcaggataggtgtgcgccagctccagactcctgcttcgtctttggtcatcgggtgaatattgtccggaaccggaacacccaccactacagagacattttttgccccaggggcaaagtagcgaaaggtcacgctgttatcggcattgacctgagtcacatactgtttcaccgggatagtgggtgccgggctggctggcatatccgctgctatggcccactgagcagaaataccgctggcaatagccagcgttaaagcagcaatttttatattcatcgtaatattcctttcattaagttccattaccaccagatttcagcctgggcaccgacagcaaactggtcgtctttattgtcttcaaaggtgaagccatccagttcgttttccagggctttgatatacgtggcgtagaaacgaatttccggacggctggtcaacatactggtattgactttaaaggtatggaagagcgtggttttataaccagactcattaaatttattactattcgcatctttgttttgctgggtgaaatagcccagttcaacacctgtctggttatattggtcccaaatataggccgggcgaacaaccgcacgaatagattcgaaatcagagtgggcgcctgtttcgtagctatatatatcgttaccgaaggagtaaacaatcgcgttagctacaatgaaatgatcgccaatataggcttcgccctggctagtcagacgtaccgctgttccgccggtgtgatcaccataataacgaccattaaaggtggtaaatggacttgcgccagcataacggccaaagttactggcgatagagttattcgcgaccaggaaggagaattcgttgaagccacctttatcaaatttctgcgttaaagatgtgccaaacatccaggtatctttccagtcataatacccgttattatcctgattatctttttcgcttgcgctttcgtttgccgtgacataacgaccacttaccattaaggtggctttatcccataacgggatatctttatagcgtaaatcaatggtattggtattaatctgctgtttgttttgcaggctgcgatcgtaatcatcgacatcttcgcgaaccagcgcgatatcaattttacccggaccgactttccagttttccagacctacacccgctgcggcatcagtacgctgcgttttccagtcaagcatctggatttcaattttcggcgcaccgtgtttacccacccagaaatcagcctctggcgcaaagggcaggaaacctttggtggtaacgtacatatcggagaactgcatatagttctcgccaccggcgttatcgccaaaccagccggtagagtactgctgaccaacgttaccatccatcatcacaacggcatcaacccgtttgccgttttcgttgtagacacgttgttttaactgcaaatcaaaccagccggagtattcgttaccaaagcggcccagagaaccaatcgcccaacttttaggactaccatgagaggcggtcccccaaccagaacggtaatagccgttgtaactaaagccaatttcatctttcacaaatttactgaaatctttcagagtcatggaagaataaatgctgcctgtctcactggcatttttctcttcatttttgaccagtacagcatcaggttttgcggcactactggtcgggaacggattggcggcatacccttgatcattcgtacttacgctacgattcaccgtcgctggcgtatactttttcttctcttcatctttatactttttgagttcgctttgcgtttctcttaacgccttttctaataactcaaggcgttgttccaccgttaaactttcagccaaactttgtgcagaaaaggctaacggtgccattaataagatggcagaggtaataagatttcgtctaaacataatatccctttatggtgcaaagaaagaattaacgcatcgcatccagactgttctgaatgcgacgataattaaggtgctttaatggttattttttttaaactcagcccccgcgtcttgatcacctctgcataccatccgaagcttttcttgcgtgttcttgtgaggcttccttcgccattatcatcacgatccacataaataaagccgtagcgcttagacatttgactatgagatgcactgactaaatcaattggcccccaactggtgtaccccataatatccacaccatcggcaatcgcttcatttacctgtaccaggtgatcgtttaaataggcaattcgataatcgtcctgtatgctaccatccgcttcaacgctgtcttttgcgcctaatccgttctcgacaataaataacggtttttgataacgatcccaaagcgtatttaacagaacccgtaatccaaccggatcaatttgccacccccactcactacttttcagatgcggattggggatcatattcagtatgttgccctgcgcatttttattaatgctttcgtcgtgggaaacacaaccagtcatgtaataactaaaagagatgaaatcgacggtatgttttaaatcttctgcgtcactttcagtcatctcaatggtgatattgtggtcgcggaagaaacgctgcatatagccgggatactggccacgcgcctgaacatcaccaaagaacatccagcgccggttctcttccatggcctgcaacatatcctgtggctggcaggtgagggggtaaaccagcccaccgagaagcatattgccgattttcgcttcggggagcaggctatgacaggctttaactgcccgcgcactggcaaccagttgatggtggatagcctgataaacttccgcctcgccactctcttctgccagccccacgcccgtgaatggcgcgtgtaagctcatgttgatttcattaaacgtcagccataacgccactttatgttggtagcgagtaaagaccgtgcgggcgtaatgctcgaagtgatcgatgaccgctcgattagcccaaccgccgtagtttttcaccagcccatatggcatttcgtaatgggataacgttaccagcggcttgatccccgcctgcgccatttcatcaaacagccgatcgtaaaacgctaaccccgcttcattcggttcgacttcgtcgccctgagggaaaattcgcgcccaggcaatggaaatacgcagacaggtgaagcccatctcggcaaataacgcgatatcttccgggtaacggtgataaaaatcgatggcgacatctttgatattctctttccccaggatgcgcggttccatttttcccattacgccatgaggctgtaaatcactggtgctgatccctttgccatcttcctgccaggcaccttccacctgattggcagctgttgcgccaccccaaagaaatgtttctggaaatgctttcataattaactccttttatcgttagcgaatgatggataacagcggttcacctgcgcttatctgcgccgtgccgtggggtaatacgtccgtaaaatcatcgctattactgattaataccggcgtcgtcagatcaaatccggcctcgcgaatagcagggatatcaaaagaaatcagccgatcgcctgtattgaccttgtcacccacgttgacgtgagcggaaaagaatttgccgtccagttttacggtgtcgataccgacatgaatcaggatctccacaccatcatcactctcaatgccaatggcgtgtaatgtggcgaacaagctagcaattcgacccgcaaccggagaacgcacttcaccaacgctgggcagaatggcaatacctttacccaacaggccactggcaaacgtggtatcagcgacgtgaatgagcggcacaatctctcccgtcatcggactacagataccgccctgctcaggtggtgtaataacctctggtgttttctcttgcggggcaccctgcgctggctgacgtttagcggtgatgaaatgaagcatcaccgtaccgacaaatgcgcaaccgatggcaatgacaccgccaataacgctggcccagacggtgaaatcaattcccgtactcgggatggtttgcatgaaggtgaaaatacttggcaaaccaaaggagtagactttcgtttgcgcgtagccaataatggtggcccccaaagccccactgatacaggcgataacaaaggggtacttacgcggcaggttgacgccatataccgctggttcggtgataccaaacagactcgtcaacgccgcacttcccgccaccacttttttctgcgcatcgcgttcgcagaggaagacgccgagcgccgccccgacctgcgccataatggcgggcattaacagcgggatcatggtgtcgtagcccagcacggtgaagttattgatacacagcggcaccaggccccagtgcagtccgaacatgacgaagatttgccagaagccgcccattaccgcgcccgcaaatgcaggaaccgcctgataaagccagagataaccggcggcaatcagttcgcttatccaggtacttagcggccccaccagcagaaaggtgacgggtgtgataaccatcagacatagcaatggtgtgaagaaatttttgattgcgctcggtaaccacgcattaagtcggcgttccagaatgctgcacaaccaggcagaaaaaataatgggaataacgctactgctgtaattcaacaatgtgaccggaatacccaggaaatccagccccagcgcatccgctttttgcccgttctcgaaagcagtcagaattaatggatgcactaacgctccaccaatcaccatggcagtaaatggattaccgccgaagcgtttccccgcggtgtatcccaggattatcgggaagaaccaaaacaaggcatcactggcgctgaataaaattaaataagtaccactttgttcggtcgtccactgaaaagtgagcgccagagccagcatacctttcaagatcccggttgccgccatcaaaccgatcagaggcgtaaaaataccactaataacataaacaaagcggtttagcagattacctttatcatcattttccggtgcctgttgcgctttttcgtcaaggcctgccacactgttaaccgccaggaagacatcggccacatggttacctatgaccacctgaaactggccaccgctttccaccaccataataataccgggggtctttttcagtacctctgcttgcgctttgctttcatcctttaatttaaaacgtaatcgcgttgcgcaatgcatcagactcacaatgttatctgcgcccccgactcctgcgactatttttctggctaactccgtcataacttgccctctaccgctttgcggcaaaactccaaaaaaaaacctgaaaaaaacggcctgacgtgaatcaagcaatttttttcaggttttgcccgcttagtgcggtaacaatcctttactcagtaataatatttcagtgttctttgcgcacgcgctctatatttatggctaaaaacataatctctgcgggactaattttacgttgatactgcaaaccaataaaaatggcgatccgttccgcacattgccatgcttgcgggtaattttgttttactgcttgttgtaaactttcatcactatcgttaatactagcatgttcaagaatacgccaggataaaaacttcagatgtgtaaccagtcgctgataactcaagctttcttcctggtaattaaggctgaactgaaattttattaattgcagcatttcgcgcattaactgcgtgacacctgcaacatcctccatatttccgctcatttgggcactgaccagatgcatggcaataaagcccacttcatctttcggtaactgcacgcccaaccgtttatcaataatggttaacgcttcttcccctagctggaactctttcgggtaaagccgctggatatcccacagcaacgggttgggcagcaacacgttttgctgaaagcgtttaatcgcaaactggcaatggtcagttaggctgatataaatactgtcctgtaattttcccaagcgctcctgcgctaaagagataatacgatcacaggttgccatcacctcaagaggaatatgacttaagagttcgcttaatcgcccgttcagttcatgactgctcaaggcatactctttttctattccactactgttaattctttcgccagcgcgtttttgaaagccaattccgcgccccatgacgactttttcccgctgttgatcatcaataaccaccacaacattattgttgagaattttggtgatttgcatgttcatagcaaggaccttttttataaacaaaaaaacccgacttcaccagtattctctggttatgtcaggttttgcctgcgaatgcagtaacaatccagtcatttattaatggtttttataacgaacatccaggttcggaaattaatttaattgcgtgcagagaaaatagcaatgcgctattgataaaaatatgaccatgctcgcagttattaactttgtgtaattttaggaatttataaagttatatataacaaatcccaataattaagttattgggatttgtctggtgaattatttgtcgctatctttccccgccagcagtttatccagctcatcgccaccgacgtgacggaaatcctgccccttcacgtagtagaagataaactcacaaatattctggcagcggtcgccaatacgttcgatagaacgcgcgcagaacagcgcagtaagtacgctcggaatggtacggctatcttccatcatgtaggtcatcagttgacgaacaataccttcgtattcctgatcgacttttttatcttcacgataaatacgtaccgcttcgtcaatgtccatccgcgcgaacgcgtccagcacgtcgtgcagcatctggatggtatgacggcccaggctctccagacttaccagcaacggctgatgctgctgggagaatttctccagcgcagtacggcagattttgtccgccacgtcgccaatacgctccagctcggcaatggttttactgatcaccataaccagtcgcaggtcgctcgccgtcggctgacgtttggcgataatgcgcacgcaggcttcatcgatcgccacttccatcatgttgacgttcttgtcgccttcgatgacgcgcttcgccagatcgctgtcctggttatgcatcgcggtgattgcatcagaaagctgctgctccaccatgccgcccatggtcatcacctgcgtgcggatactttccagttcggcgttgaactggccggaaatatgtttattaagattgagactgtccataacgcactcctgaatcaaccgtaacgaccggtgatgtagtcttctgtttgtttcttcgctggcttggtgaacagatcgtccgtgttgctgaactcaatcaattcgcccaggtacataaacgccgtgtggtcggaacaacgcgcagcctgctgcatgttgtgggtgacgatcaccacggtgtaatcctgcttcagttcggtgatcagctcttcaatacgcccggtagagatagggtcgagcgcgctacacggttcgtcgagcagcagcacttccgggcgaatggcgataccacgcgcaatacacagacgctgttgctgaccaccagagagagagtaaccgctctggtgcaatttatctttggtttcgttccacaatgcggctttggtcaatgcccactgcacgcgctcgtccatgtcggcacgggagagcttctcaaacagacgaacgccaaaagcgatgttgtcgtagatggacatcggaaacggcgtcggtttctggaacaccatgcccactttcgcacgcagcagtgcgatatcctgagagttggtcaggatgttgtcgccatcaagcagaatttcaccttccgcacgctgctccgggtacagttcaaacattttgttgaaggtacgcagcagcgtgcttttaccgcagccggacggcccgataaacgccgttacctggtttttagcgatatccaggttgatgtttttcagggcatggaatttgccgtagtagaagttcaaattacgaacctgaattttactcggggcagtttcaaccatactcattgcaatcttttcctcatcgtgcctgatgcacttcgctaatcaggcttaccgtaggccggatcaggcgttcacgccgcatccggcaaagtgttaaccgtgtacagagtcaaaaaggcgctcggtcggtcccctcgcccctctggggagagggttagggtgaggggaaaaccgtgtcagcaatatcaaccgtgtttattcttcgcaaaaacaacgcgcgccagaatgttcagcagcagtacgcacagggtaatgatcaataccccggcccaggccaattgctgccattccgcaaacgggctcatcgcaaacttaaagatcgtcaccggcaggttggcgatcggctgcatcatgtccgtgctccagaactggttggagagcgcggtaaacagcagcggcgcggtttcaccagcaatacgggcaatcgccagcaggataccggtcataatcccggacacgctcgctttcagcgtaatcgcagagatcatcttccacttcggtgtacccagcgcataagccgcttcacgcaggctgtacggcaccagtttcagcatgttctcggtggtgcggataacaatcggcacctgcaacaacgccagggcaatcacgcccgcccagccggagaagtgctccatctgcgccaccacaatggtgtaaacaaacagaccaaccacaatgctcggcgcagagagcagaatgtcgttaatgaagcgaatcacttctgccagccaggatttacgaccatattccgccagataaatccccgccataatgcccagcggcgtaccgaataccgtggcccacaaaattaacagcccgctacccgccagagcgttcgccagaccaccaccttccgtattgggcggcggcgtcatttcagtgaacagcgccaggctcataccgtcgataccgcgagtgatggtggacattaaaatccagatcagccagaacaggccgaaggccatcgtcgccatgctgagcgtcagcgcaatacggtttttgaggcggcgacgcgcctgcattttgcggcgagattcagccagcgccgcagtggtttgcatttcaaccatagccattagcgtgccccctcattcttagccaggcgcataatcataaacttgcttgcggcgaggacgatgaaggtaatcacaaacaggatcaggcccagttccatcagtgcggcaacgtgcagaccggattccgcttccgcaaattcgttcgccagcgcagaggtgatactgttgcccggcatatacaggctggcgctgtcgagctggtaggtgttaccgatgataaaggtcaccgccatggtttcaccgagcgcgcggcccagccccagcatgatgccgccgataacaccatttttggtgaacggaagaacgatacgccagataacttcccaggtggtgcagccaataccgtaggcgctctctttcatcatcaccggggtttgttcgaacacatcacgcattaccgccgcaatgtacggaataatcatgatggcgaggatcacgcctgccgcgaggataccgataccaaatgcggggccagagaacagcgcgccaacaatcgggatattgctcatgatattgccgaccggctcctgaaagtaaacggcgaacagcggcgcaaagataaacaggccccacatgccgtaaacgatacttggaatggctgccagcagctcaatggcgatacccagcgggcgtttcagccagccaggcgcaagctcagtcaggaacagggcgataccgaaactcaccgggacggcgatcagcagcgcgataaagctagtcaccaacgtaccgtagatcggcaccagcgccccgtagatatcgttcggtgcatcccactctttggtccataggaaagccagaccaaatttctgaatgctcggccaggaggagatgatcagagagacaataatgccacccaacatcaatagcacaatcagcgccgccagttttaccagcacgctgaaaattatgtcgccctttttacccggtgggttaaaagcaggcttggttgcagccataagttactcttcagttaaacgcgtttacaaagtcattttgtaatgccggatgcggcgtaaaacaccgtacccggcctggagttttattagtacagcggcttaccgctactgtctttaatattggtcttccacgcagcgcgaacctgttcaactacactatccggcaggctggcgtaatccaggtcgttcgcctgtttagccccggttttgtacgcccagtcgaagaatttcagcacttctgtgccttgttctggtttcttctgatctttgtggatcagaatgaacgtggtagaggtaataggccatgcatcttcgcctttctggttggtcagatcctgagcgaaggttttgctccagtctgcaccttttgctgcattagcgaagttttcttcggtcggactaaccggtttaccatcagcggagatcagtttggtgtacgccaggttgttctgcttcgcgtaagcatattcaacataaccaattgcacccggcagacgctgaacgaacgcggcgataccgtcgttacctttaccgcccagaccgatcggccattttacggtagagccagtaccaacgttgtttttccactcttcgttcactttcgccaggtagctggtgaagacgaaggaagtcccggagccatctgcgcggcgtactacagcaatgttttgactaggcagtttcagacccggattcagtttggcgatggcttcatcatcccacttcttgattttgcccaggtagatgtcgccgagggttttaccatccagcaccagttcgccagacttcagccctggaatgttaaccgccagcaccacgccgccaatcacggtcgggaactggaacagaccttcctgagccagtttttcgtcagacagcggcgcgtcagaggcaccaaaatcaacggtattagcgataatctgttttacgccaccggaagaaccgataccctggtagttaactttattaccggtttctttctggtaagtgtcagcccatttggcatacaccggcgcagggaaggttgcacctgcacctgtcaggcttgcttctgcaaacacagagaaagcactcatgcttaaggtcgcggcgacaacagttgcgacggtggtacgcataactttcataatgtctcctgggaggattcataaagcattgtttgttggctacgagaagcaaaataggacaaacaggtgacagttatatgtaaggaatatgacagttttatgacagagagataaagtcttcagtctgatttaaataagcgttgatattcagtcaattacaaacattaataacgaagagatgacagaaaaattttcattctgtgacagagaaaaagtagccgaagatgacggtttgtcacatggagttggcaggatgtttgattaaaaacataacaggaagaaaaatgccccgcttacgcagggcatccatttattactcaaccgtaacgctttttgccaggttacgcggctggtcaacgtcggtgcctttgatcagcgcgacatggtaagccagcagctgcagcggaacggtgtagaagatcggtgcaatcacctcttccacatgcggcatctcgatgatgtgcatgttatcgctacttacaaaacccgcatcctgatcggcgaagacatacaactgaccgccacgcgcgcgaacttcttcaatgttggatttcagtttttccagcaattcgttgttcggtgcaacaacaataaccggcatatcggcatcaattagcgccagcggaccgtgtttcagttcgccagcagcgtaggcttcagcgtgaatgtaagagatctctttcaacttcaatgcgccttccagcgcgattgggtactgatcgccacggcccaggaacagcgcgtgatgtttgtcagagaaatcttctgccagcgcttcaatgcgtttgtcctgagacagcatctgctcaatacggctcggcagcgcctgcagaccatgcacgatgtcatgttcaatggaggcatccagacctttcaggcgagacagcttcgccaccagcatcaacagcacagttaactgagtggtgaatgctttagtggatgccacgccgatttctgtacccgcgttggtcattagcgccagatcggattcgcgcaccagagaagaacccggaacgttacagattgccagactaccaaggtaacccagctctttgctcagacgcaggccagccagggtatccgcggtttcgccagactgactcaaggtgatcatcaggctgttacgacgcacggcagatttgcgatagcggaattcagaggcgatttcgacgtcgcacggaatacctgctaggctttcaaaccagtagcgggaaaccataccggagttataagaagtaccacaggcgaggatctgaatatgctcaaccttgctcagcagttcgtcggcgttcggtcccagctcgcttaaatcaacctgaccgtggctgatgcgtccggtaagggtgtttttgatcgcgttcggctgttcgtagatctctttctgcatgtagtgacggtaaatgcctttatcgcccgcgtcatattgcagattggattcgatatcctgacgttttacttccgcgccagttttatcgaagatgtttacgctacggcgagtgatttccgcaatatcgccctcttcaaggaagataaagcgacgggtcaccggcaacagcgccagctggtcagaagcgataaagttttcgcccatccccaggccaatcaccagcggactaccagaacgtgccgccagcagggtatccgggtgacgggagtccatgatcactgtaccgtacgcaccacgcagctgcgggatagcacgcagaacggcctcacgcagagtcccgccttgtttcagctcccagttcaccagatgggcaatcacttcggtgtcggtttcagaaacgaaggtatagccacgcgcttttagctcttcacgcagcggttcatggttttcgatgatgccgttatgcaccaccacaatgtgttcagaaacatgcggatgcgcattcacttcactaggttcaccgtgggtcgcccagcgagtgtgagcaataccagtgccgccatgcagaggatgttcttccgctgcctgtgccagcatctggactttaccgaggcgacgcaggcgggtcatatgaccttctgcatcaacaacggccagaccggcagagtcatatccgcggtattccagacgacgtaaaccttcaagaaggatttctgctacatcacgttgcgcgatcgcgccaacaattccacacatagtttttgattccgatttatatcgttgtcggtcaacctgtatgcccgttttttcgggcgccccgagccttgtagagagtggggttatttttatagttactgcttgtgggagggagattatgttatctcctcatcccatgtgaccgggttagccggccagaatcactttttctttaccggacgacgccagccttctttctgagtctgcggcacacggctgatagctaatgcattttcgccgacattacgcgtcacagttgtacccgcagcaatggtcgcgcctttgcctactgttaccggggccaccagctgagtgtcggaaccaacaaacacatcgtcgccgataatggtcttaaatttattcgcaccatcgtagttgcaggtaatggttcccgcgccgatgttaacgttatcgccaatttccgcatcgcccaggtaagtcagatgaccagctttgctgcctttacccagacgcgcttttttcatctcaacgaagttaccgacgtgagcaccttccagcaactcagcaccaggacgcaaacgggcaaacgggccaatggtacaggccgctgccagattcgcatcttccacaacggtatacggactgatttcgcaatcatcgccaatcacgctgtttttaatcacgcaaccggtgccaattttcacgcgatgaccgagagtcacgttgccctcgatgataacgttagtatcaatttcaacatcgcgcccgtgagttagcgtaccacgcagatcaaaacgcgctggatcgcgcagcataacgcctgctaacagcagtttttcagcctgttcggactgataaacacgctccagacgggagagttgcaggcggttattcacgccttctacttcgcttaaacgttgcggatgaacggcgacgatttcacgcccttcctgatacgccagcgcaataatgtcggtgatgtagtattcgccctgagcattattgttggtcagcttcgccagccagcgtttcatatctgcgccgttggcaatcagaatgccggtgttgatctcctgaatctgacgctgctcgtcggtggcatctttgtgctcaacaatgccggtaactttgccgttttcacgggtgatacgtccataaccggtcggatcatccagtttcaccgtcagcagaccaatgccaccctgcggtttagcatcacgcagacgctggagtgtttcgacagagatcagcggcacgtcgccgtagagcattaaaatgtcttcatcatcggcaaagaaaggtgcggcctgctgcattgcatgacccgtacccagctgctctgcctgaagcacccagttaaggttgtcgtctttcagcgcctgttttagcagatcgccgccgtgaccgtacaccaggtgaacgtgcgctgcgcctaattcattcgcagcatcaatgacatgctgaaccatcgctttcccggcaagggtatgcagcactttcggaagatcggaatacatgcgcgtgcctttgcctgcggcaaggatcactacgctcatagcattattcaacatacgcgtcctgactgtaatttgagaacgaatttaaaccgcttcaccttgaaaaaactacatttttttcatcgtgaaatggacagaggataaattgttcaataacggattatccccgctgacgaaagcgccattttcgaccatcgtcacgccttttgtctgcagaaaattaaggcagtaccttaatttaagcgtcaggtggatgtttttgctcttatttcgatcaatgaataaacaggaaaacaggggggttttatatcagcaggatctatgtgaacgctattcaggacgggtcacacgcgcaaaaaaaagccagcctgtttccagactggcttttgtgcttttcaagccggtgttacatcgcttttttggtcaactcgataacgcgcagctgcgcgatcgctttggccagttccgcagacgcctgagcgtaatctacgtcgccgtgagagctgctaatgtgctcttcagccttacgtttcgcttccatggctcgcgcttcgtcgagatcctggccgcgaattgcggtgtcggccagaacggtcacgttgccaggctgcacttcaagaatgccgccagacagatagataaactcttcgtgaccgtgctgtttcacgatgcgaatcataccaggcttaatggcggtgagcagcggtgcgtggccagggtagatccccagttcaccttcgctacccgttacctggattttctcgaccagaccagagaacatttgttgctctgcgctgacgacgtccaggtggtaagtcattgccatatcaccctccgattaaggcgttaaagttttttggctttttccacagcttcttcgatggaaccgaccatgtagaacgcctgctccggcaggtgatcgtattcgccttccatgatgcctttaaagccacggatggtgtctttcagggagacgtatttacccggagaaccggtgaatacttctgccacgaagaacggctgggacaggaagcgctggatcttacgagcacgcgctaccaccagtttgtcttcttcagacagttcatccatacccaggatggcgatgatgtctttcagttcctgataacgttgcaggatggactgaacgccacgcgcggtgtcgtagtgttcctgaccaaccaccagcgggtccagctgacggctggtggagtccagcgggtcaacggccgggtagatacccagagacgcgatctgacggctcagtaccacggttgcgtcaaggtgcgcaaaggtggttgccggagacgggtcagtcaagtcatccgcaggtacgtatactgcctgtacggaggtgatagaaccagttttggtggaggtgatacgttcctgcagaacgcccatctcttccgccagggtcggctgataacctaccgcactaggcatacggcccagcagtgcggatacttccgtaccggccagggtgtaacgatagatgttgtcaacgaacagcagaacgtcacgaccttcgtcacggaatttctcagccatggtcagaccggtcagagcaacgcgcagacggtttcccggcggctcgttcatctggccatacaccagggatactttgtcgataacgttggagtcggtcatttcgtggtagaagtcgttaccctcacgagtacgttcacctacgcccgcaaacacagagtaaccggagtgctcgatcgcgatgttacgaatgagctccatcatgtttacggttttacctacacccgcaccaccgaacagaccaactttaccgcccttagcgaacggacacatcaggtcgataactttgataccggtttccagcagttcctgagagttactcagctcttcgtaggaaggtgctgcgcggtgaatcgcccaacgctcttcttcaccgatctcgcctttcatgtcgaccggttcacccagtacgttcatgatacggcccagagtcgctttacctaccgggacttcaatcgggtgttcgaggtcttttacatccagaccgcgacgcagaccgtcggaggaacccattgcgatggtacgtacgataccgccgccgagctgctgctgaacttccagcaccagacgctcattaccattttgcacctcaagagcatcgtacacgcgcggtacggcatcctgagggaattcgacgtcaactacggcgccgattacctggacaatctttccagtagccatcttaaatcctctacgaaataacctgtttaaaccgcggcggccccgctgacgatctcggtgagttcctgagtaatgctggcctgacgagctttgttgtataccaactgcagctctttaatcaggctgccgccattgtcggtcgcggctttcatcgccaccatacgggcggcctgctcgctggccaggttttcaaccacgccctgataaacctgagattcgacataacgacgcagcagggtatccagcaacgccttcggatcgggttcgtacaggtaatcccaggatttatgtttcagatcatcatcatcacttgccggtaacggcagcagctggctgatggtcggaacctgagacatggtgttaataaatttgttgctgacaatgtaaagcttgtccagacggccttcgtcgtaggcctgcaacatcacttttaccggaccgatcagttcggacagggaagggttatcccccatgccggtgacctgggcaacaacattgccgcccacggagttgaagaagctcacgcctttgctgccgatcattgcgaggtcgcattgaacgcctttgtcggtccaggtcttcatttccgccagcagttttttgaacaggttaatgttcaaaccaccgcacaaaccacggtcggtgctcaccaccaggtagcccacgcgtttaacgtcgcggtcttccaggtaagggtgcttatattccagattaccgtgtgcaaggtgaccaatcactttgcgcatggtttctgcataaggacggctggccgccatgcgatcctggcttttacgcattttggaagcggcgaccatctccatcgctttagtgatcttttgcgtgttctggacgcttgcgatcttactacgtatctcttttgcgccggccatgagcttctcctcaatgccttgcggcctgccctaaggcaagccgccagacgttaccaggattgggttgctttgaaggaatcgaggatgcctttcagcttgccttcgatttcgtcgttgtagccaccggtctggttgatctcttgcatcaacggagcgtgatcacggtcgacgtaagccagcagagcggcttcgaagctgccaattttgctcagttcaacatccgccaggtaaccacgttctgctgcgaacagaaccagagactgctgcgcaacggacatcggcgcatactgtttctgtttcagcagttcggtcactttctgaccgtggtcaagctgcttacgtgttgcatcgtcaaggtcggatgcaaactgagagaacgctgccagttcacgatactgtgccagagcggtacggataccaccggacagttttttcatgatcttggtctgtgctgcaccaccaacacgggatacggaaatacccgggttaaccgcaggacgaataccggcgttgaacaggttggtttccaggaagatctgaccatcggtaatggagattacgttggtcggaacgaacgcagaaacgtcacccgcctgagtttcgataatcggcagtgcggtcagagaaccggttttccctttcacttcacctttggtgaaggcttcaacgtattcggcgttaacacgtgcagcacgctccagcagacgagagtggaggtagaaaacgtcgcccgggaatgcttcacgtcctggcggacgacggagcagcagggagatctgacggtaagcaacagcctgtttagacaggtcatcgtaaatgatcagcgcatcttcaccgcggtcacggaagtattcgcccattgcgcaaccggcatacggtgccaggtattgcagtgcagcggattcagacgcggttgctaccacaacgatggtgttagccagtgcgccgtgctcttccagtttacgtaccacgttagaaatggtggacgctttctggccgatagcgacatagatacatttgataccggaatcgcgctggttgatgatggcatcgatagccagtgcggttttacctgtctgacggtcaccgatgatcaattcacgctgaccacgaccgattgggatcatggagtcaacggctttataaccggtctgtaccggctgatctacggactgacgttcgataacgcccggagcgattgcttctacagcagagaagccgtcgtgatccagcggacctttaccgtcgattggtgcacccagagtgttaaccacacggcccagcaggccacggccaaccggaacttccaggatacggccagtacacttaactttcatgccttcggcaaggtcagcgtacggacccataacaaccgcacctacagagtcgcgctcgaggttcagtgcgatagcgtaacggttacccggcagggagatcatttcaccctgcatacaatcggccaggccgtgaatgcggataacaccgtcacttacagaaacaatagtaccttcgttgtgagcttcactcacaacattgaactgagcaatgcgctgcttgatcagttcgctgatttcggtggaattcagttgcatgctccagtccccttaagactgcaagacgtctgcaaggcgctcaagacgaccgcgtacgctgccatcaatgaccatatcacccgctcggatgataacgcctgccattacagacttatcgattttgcaattcagcttaactttgcgactcagacgtttttccatcgcagcagaaattttcgcgagctgttgttcactcagtgcggcagcggaaatgacgtctacctcagcggtagcctcactcacggcacgcaggtgaataaactgctccagaacatccgggagcgcgttaagacgaccattttcagccataacccgaatcaggttctgaccgttttcgtccagttgctcaccacaaactgcgataaagctctcggcgagcgtttctggcgcaagcgcgccagagagaagctctgccatttgttcgtttttggttacctcggcggcaaacgccagcatgtcctgccagcgttctacactttggtgttcgacggcaaagtcaaaagctgctttggcgtaggggcgagctaccgtaataaattcagacatcagcccctccctccttacagttcagcgacaagtttatccacgatgtcgctgttagcagcttcatccacggaacgttcgatgatcttctcggcgccagcaacagccaggatagcaacttgcttacgcagctcttcacgggcacgtttacgctcggcttcaatttccgcctgcgcctgggccacgattttagtacgttcctgttctgcctcagctttcgcttcgtccagaatctggctgcggcgtttgttcgcctgctcgatgattacctgggcttccgctttcgcttttttcagctggtcggtcgcgctggcctttgcaaggtcaaggtccttatgtgctcgttctgcggaagcaaggccgtcagcaatttctttttgacgtttttcgatggctgccattaatggcggccatacgtacttcatgcagaacagaacgaacaggacaaacgcgatggcctggccgaggattgttgcgttaagattcacagcacaatgcctctatttagttaacgttctgatattgctctttaaataaaagcaacgcttattacgcgacagcgaacatcacgtacagacccagacctacagcgatcatcgggatagcatccaccagacccataacgataaagaactgagtacgcagcagaggaatcagatcaggttgacgcgctgcgccttccaggaatttacccccgaggatgccgataccgatcgcagcaccgattgccgccagacccatcatcacagcggcagccatgtacagcagatccatattcaggttttccatgacagtctccagtttgtttcagttaaaacgtagtagtgttggtaaattaatgttcttcagacgccatgctcagatagacgatcgtcagaaccatgaagatgaaggcttgcagcgtaatgatcaggatgtggaaaatggcccacggcacattcaggatccactgactccaccacggcaacagaccagcaatcagaatgaaaatcagctcaccggcatacatgttaccgaacagtcgcaaaccgagactaactggtttggacagcaggcttaccccttcaaggattaagttgacaggaatgaacgcccagtgattgaacggctgcagcgtcaactctttcgtgaagccgccgatgcctttcattttgatgctgtagaacagaatcaggataaatacgcccagtgccatagacagcgttacgttcacgtccgcagacggaaccacacgcagtgcaggcagacccagtacatgttcagcaatgtacggcagcaggtcgataggcagtaaatccatcaggttcatcaggaatacccagacgaagatcgtcagggccagcggagcaatcagcttgcttttgccatggtacatgtctttcacgctaccattaacaaagccgatcaccagctcaatcgcggtctgaaacttacctggcacaccgctggtcgcctttttggctacgctacggaataaaaccaggaacaacagacccagcaccacgctgaagaacatggagtcaatattgattgtccagaaggtggctggggggttttgtggatccaccaggctgaatgtacgcaggtccagctgaaggttattcaggtggtgtcctatgtaatcctgcggcgtcatattttcactagccatgatgccttttaccctttgttgttaattacagccggtgccagtatctgaaccaccagcaccaaaacccacgtaacgatcagcggcaagaataccgcctttaaaaccgccaacgccaccaccagtaacaccaacatcgccagaactttgaaagcttcgccaaatgcgaatgtccaggccacccggcctttcgctggtgtatgcgcctggtgacgccaggcaaatatcataaacaaaacgttaggcagaaagactgccaggcccccgcttattgcagagacgccccagaaggggtctttgaggctgaacagcaatccacttgctatcaccaccagtaactgaacgagcagaagcttccgagcaacgtttcgactcacgaggctcacagacatcacgtttttcactcctgctcccttcgaggtatgccgcgtgtcgtataaaactttctttaaggcttagagtcaagcatcaaaaagcggtcaaattatacggtgcgcccccgtgatttcaaacaataagtagccaaaaggtgaataaatgtttaaatatttttccagtgcatacaattgcgacttttctgctaaccctgttcgatcatgaaaaactgtaaataacgcgtaaacactggtgataaagcgtgcttcagatcacatattgcgcatgttcgcgcacagcatatttatttacttggcaaatgatgcctttgcaagtttatgatatttcagtctaaaaacagatactgttttaataaatgacatttacacaacaaaaaccacccattgacatttttaataatgttttaacagccaatgatggttcttagcgccgatttttagcagactgatattttcactaatgacttattttctgcttaccaaaaaaagccacgttatcttgttgatgcaaaagagtgaacgtggcgttaaatgtaaccagttatatcagtagaaaacctggttgttgttaacagtctaaccggtcaattttttatgatttttttgataaaaattaaattttatttgctttaatcaccaccagatgacgttcgccatccagggctggaacctgaagtttaaccacactttcgacctgatattcttcgggcaacaaagcgatttcatcttccggcatttgccctttcagcgcgtagaaacggccttgctcaccaggaagatggtggcaccagctcaccatatcgttcagagaggcaaaagcgcggctaattacgccatcaaatggcggctcactaggaaactcttctaccctgctctgtactggttcaatattctccagtttaagctcatgttgcacctgacgaaggaaacgcacgcgtttaccaaggctatccaacagagtgaaatgggcttcaggacgcacgatagagagtggaatgcctggcagtcctggtccggtgccgacatcgataaaccgttcaccttgcagatacggtgccaccacaatgctatcgagaatatggcgtaccagcatctcattaggatcgcggacgctagtcaggttgtacgctttgttccatttatgcagcatattcacgtaggcaataagctggtttttctggtgatcggtaaggctaatacctgcgtctttcagcagtaaggagagtttgttgagcacggtgattacctgttcttgatgcgttgcctggtaagcgggtgcttaccaggcatttttaatgcgttatgcgctacgacgcagcataccctgttttttcagccacaccagcagaatggagatggccgcaggcgtgacgccagaaatacggctagcttggccgatagaggctggtttgtgatcgttaagtttggcgatcacttcgttagaaagaccggatacctggcggtaatccagtgtcgcgggtagcagggtgttctcgttacgcagctgcttttcgatctcatcttgctggcgcgcgatataaccttcgtatttaacctgaatctcaacctgttccgccgcctgttcgtctgtcaacgcaggggcaaacggcgtcagcgtggttaatttttcataagtcatttccggacgacgcagcagatcttcaccactggcttcacgggaaagcggcgcagtcaggtgagcattcacttcggctgcagcttccgcgctcggggttacccaggtgcttttcagacgctgacgctcacgctcgatattctcaagtttctcgttaaagcgcgcccaacgttcgtcatccaccaggcccagttcacgaccgatttcagtcaaacgcagatccgcattatcttcgcgtagcatcagacgatattctgcgcggctagtaaacatacgatacggttctttggttcctaaagtgcacaggtcatcaactagtacgccgagatacgcctgagaacgtgccggagcccaaccttctttgtcagcagacagacgggcagcgttaagaccggccagcaaaccttgcgcagcggcttcttcgtaaccggtagtgccgttaatctgaccagcaaagaacagcccctggataaacttgctctccagcgtcggtttcaggtcgcgaggatcgaagaagtcatactcaatggcataacccggacgcacgatcttcgcgttttccatcccctgcatagagcggacgatttgcatctgcacatcgaacggcaggctggtggagataccgttcggataaatttcattagaggtcagtccttccggttcaaggaagatctgatgctgatttctgtcggcgaagcgcatgactttgtcttcgatgctcgggcagtagcgtgggccgacaccttcgatcacccctgcgtacattgggctacgatcgaggttactgcggatcacatcatgggttttctcgttggtatgagtgatataacacggcacctgctggggatgctgggacgcattgcccataaagctgaataccggcattgggttatcgccatgctgttgcgccagtacgctaaagtcgatggttcgagcatcaatacgcggtggtgtcccggttttcagacgaccaacgcgcagcggcagttcacgcaaacggcgagaaagcggaatggacggcggatcaccagcacggccaccgctgtaattatccagaccgatatgaattttaccgtcgaggaacgtcccaacggtgagcacgacggctttggcacggaacttcagtcccatttgggtaacagcaccgaccacgcgatcgttttcgacaataagatcttcaaccgcctgctggaagatcatcaggttcggttggttctccagcgccgtacgtaccgcctgacggtagagcacacgatccgcctgagctcgggtagcgcgaaccgccggtcctttgcttgcgtttagtatcctaaactggatacccgcctgatcgatcgctttcgccatcagaccgccgagtgcatccacttcttttaccagatgtcccttcccaataccgccgatcgccgggttgcagctcatctgccccagagtgtcgatattgtgtgtcaaaagcagagtctgttgacccatacgcgccgcggccatcgcggcctcggtgcctgcatgacccccgccaatgatgatgacgtcaaaaggatccggataaaacatggtgattgcctcgcataacgcggtatgaaaatggattgaagcccgggccgtggattctactcaactttgtcggcttgagaaagacctgggatcctgggtattaaaaagaagatctatttatttagagatctgttctattgtgatctcttattaggatcgcactgccctgtggataacaaggatccggcttttaagatcaacaacctggaaaggatcattaactgtgaatgatcggtgatcctggaccgtataagctgggatcagaatgaggggttatacacaactcaaaaactgaacaacagttgttctttggataactaccggttgatccaagcttcctgacagagttatccacagtagatcgcacgatctgtatacttatttgagtaaattaacccagcttcccagccattcttctgccggatcttccggaatgtcgtgatcaagaatgttgatcttcagtgtttcgcctgtctgttttgcaccggaatttttgagttctgcctcgagtttatcgatagccccacaaaaggtgtcatattcacgactgccaataccgattgcgccaaagcggactgcagaaagatcgggcttctgttcctgcaatgcttcatagaaaggagaaaggttgtccggaatatctccggcaccgtgggtggagctgataaccagccagatcccactggcaggtaaatcttctaacagcggaccgtgcagcgtttcggtggtaaaacccgcctcttccagcttttcagccaggtgttctgctacatattcggcaccgccgagggtgctgccgctgataagagtgatatctgccataaaccgccacctttattaagagtggcgtattgtacgctgtgaacgcgttgggatctacctgtggaaaagtatgggattaaaaaagccgatcagggcttgatggtacgcatgatcgggttttgcaggacgatcaatgtctcggtggactgaatttcatcaattgtttggatcttgttgataagtacatgctggagagcgtcgatgctacggcacatcacttttataaagatgctgtagtggccggttgtgtaataggcttcagtgacttcatcaaggctttccagctttgccagcgcggaagggtagtctttggcgctctttaatataatgccgataaagcagcctacgtcataaccgagctgcttcgggctgacatcaatacgcgccccggtaatgatccccgcctgcttcattttctctactcgaacgtgaatcgtccccggactgacgccaaattgtttcgccagttcggcgtaagcggtgcgcgcattgcccattaatgcttccaggatgccacggtccagattgtcgatcagataattttccataggattttcttatgcggattgatgattcattctattttagccttcttttttaatgaatcaaaagtgagttaggctttttattgaatgattattgcatgtgtgtcggtttttgttgcttaatcataagcaacaggacgcaggagtataaaaaatgaaaaccgcttacattgccaaacaacgtcaaattagcttcgtgaaatctcacttttctcgtcaactggaagaacgtctggggctgatcgaagtccaggcgccgattcttagccgtgtgggggatggcacgcaggataacttgagcggctgtgaaaaagcggtgcaggtaaaagtgaaagctctgcctgatgcccagttcgaagtggttcatagtctggcgaagtggaaacgtcagaccttagggcaacacgacttcagcgcgggcgaagggctgtacacgcacatgaaagcccttcgccccgatgaagaccgtctttctccgttgcacagcgtctatgttgaccagtgggactgggaacgcgtaatgggcgacggtgagcgtcaattcagcactctgaaaagcacggtagaggcgatctgggcgggaattaaagcaaccgaagctgcggttagcgaagagtttggcctggcaccgttcctgccggatcagatccacttcgtacacagccaggagttactgtctcgttatccggatcttgatgccaaagggcgtgagcgggcgatagcgaaagatcttggcgcggtattccttgtcgggattggcggcaagctgagcgatggtcatcgccacgacgtgcgcgcaccggattatgatgactggagcaccccgagtgagctgggccatgcgggtctgaacggcgatattctggtgtggaacccggtactggaagatgcgtttgagctttcctccatggggatccgtgtagatgccgacacgctgaagcatcaactggcgctgaccggtgacgaagatcgcctggagctggagtggcatcaggcgctgctgcgcggtgaaatgccgcagaccatcggcggcggtatcggccagtctcgtttgactatgctgctgctgcaactgccgcatatcggccaggttcagtgtggagtatggccagctgctgttcgcgagagcgtcccttctctgctgtaataatttatcgccgccagcgtctgagcaggcggcttcgcatcccggtatcaaagcgccagatatgatcgaaaatgcgcatgatgccgggtttgccgtgtgcgctcatcgccacggcatgaaagcgatgctgatgtacccgctgcagctctttcactttactcgtcacgtcgtcaggcaaccgctgagcgataaaatcagaaatcaccaccgcatcggcatcaaaccattccctgctttgcaagcgttccataatggcgcgaaaacaactggcaagatcggtgccgccacgaaactgctggcttaaaaaacggattgcttgttcgatgccttgtgggccactaagctcataacggacgatctcggtggaaaatagcataatatagcagcgccggttttctgcgagagcaatgcgcatcaaggccaggcagaacgctttcgcacactgttcattaaagccgcccatactgccggaagtatccacacagacaataaacggcccgcgcggctgttcatcgtaatctttatgtaccaccggacgttcgatcactttttcacgccagctctcaccgtgcaggcgataggtgagcaactgtttttccaccagccgacggtaaaactcatactccagttccgttatccctagtgtcgccagttctggcggcaggagacgtaaaatatcatcgctttgttgcagaccatcaacctgctcaggaaccgtcgccggttcgcgcaccatggtgcggaaggtttccatctgcgcatcgttgcgcggtatacttttggcttcccgagaacgccccagctgctctgccaggcgtttcagttccggctgttcgttaagaaattcaccgtatttcacaatcaactgatagtcgccacgtttaagctgaccggcgctcatatcccacagacgaccagctgcagtattgttatctgcgagaatcggttcaagttgtccgctcagcgtcatgcgttcctgaacttcactcaacagttgttcgcgttcttcttctaatagctgttgatttaacgtcgttgcttgcacgatcagacttaaacgccaacgctggagaaaaagcgtgtgtaacgcactagtgatcgtgctgttagcatcaaccaactgtcgggcttgttctgcccatggagaattcagacgatgcagtaagtccaggatctgtggtagctgcacaataaactgtggcgtggagaggagctggctttgctgatagcacatcacctcttcggtgagttccggcgggactcgggcatctttcagccgactgcgcagcgcttcacgccagcggggaacatcatcagtgattgccgccttcaggcgtgggaatttttcaaagaagaccgccagctgcggactggccagcagtgcgatgatcatctcttcgatcaatccctcttcgctgacggccagcatcacattaagcgtatccagcgttagcattgttgtgcctggcgaatctgtgcaccgacatcctgtaggctggcttcaatgcgacctaaccagtcgccagggataaacagacatttttgctgttcgctgaataaagcgtgttgcttgcgccagtcgctttcaagctcttccagttgttgttttatttcaccaggcagaccttcagcgctactaccgggaagtgccagcgtactgccttgtaaacttacatcgcgaacgacaagatgttgggcgctatcaacttccagattcagtttctgggcaaagccgataccgttcagtttaccgcgaatttcaccacctttgctcagccactgttccagcgcgctacgctcaaaggagatatgaaccacttccatatcatgcagttttaacggtttttgcagcagtagagtcagagtggaagcagtaacgttaacaggaagttgatactgctgacgacggctgaaaatgccgcccagacgaattaccgttaaggctgttttatcgctttgttgctgctggagttgcaggtgacgttgcacaatcgcgccaaggcgagtcaacatcccttgctgttgccaggcgtgaccggtcatcaatacatcaatttgttgttgtatcaaattcaggctttgcgcgtcataccacaggcaatctttcagcaaaatgagatctaccggggcaacagcactgcgaccgctaaaaaaggcgctggcctgcaataatcggatcgcttttttccagcgacgatcgctgacataaggcgcatccggtaatttatccagttgctggcgcagcataaaaatcagctcaaatacatgatcgggcagcgtaatttcaccaatctctttctgccagcgttcatattcttcatctgtgacctgcaaggcatcaggaaccggattgtcgttttcatcctgttgactggtcagcatggagcggaaattcgctttatcctgcactttatctaaccacagacgaatcagcatgcggtcatataacgcttccagactgctgtctgcttccggcagctcgttggaggccgccaccagcagacgcatcgggattttttctacgtgtgcaccgttgcggaactggcgctcgttaatggcggtgagcaaggtattaagaattgccgggcccgctttccagatctcatccagaaagacaatttctgcttccggcaggtaaccgctggttaaacgttcatagcgcccttcatcttttagcgcctgaatagaaaggggaccaaaaacttcttccggcgtggagaagcgggtcatcagatattcaaacgcgcgggcattctgaaaggcgaattttaagcgccgggcgatcaaacttttggcaatacctggcgggccaaggaggaacacactttcaccacttaatgccgctaataaacacaagcggatggcgtggctacgttcataaagccccttttccaagctactgctcaggcgggaaattctttccgctaataaatgagggtgagccataatgaagtggcgtcctttcgtcaaaagttctgcgtaaattgcgagtatagacgtttcttgctggtggctaaaatagtctcaaagggggggtatttttctttgagccaggttaatgtggccgcatttaggagtacgattttgccgttaatcgtgcatactgtgcgcttttttgtgggccaagggactaagcacacatttcatatttcaacgaaagactagtctatgagcactgataataagcaaagtttgcccgcgattaccctcgcggcgattggagttgtctacggcgatattggtaccagcccgttatatacacttcgtgaatgtttgtccggccagtttggttttggcgttgaacgcgatgccgtgtttggctttttaagcctgatcttctggctgctaatctttgtggtttccattaaatatctcaccttcgtgatgcgggcagataacgccggtgagggggggatcctgacgttgatgagccttgccgggcgtaatacgagcgcgcgaaccacaagtatgctggtgattatggggctaatcggcggcagctttttctatggtgaagtcgtcataacacccgctattagcgtgatgagtgccattgaaggtctggaaatcgtcgccccgcagctggatacctggatagttcccctcagtattatcgttctcactttattatttatgattcaaaaacatggcacggctatggtcggtaagctgtttgcgccgatcatgctgacctggtttttgattctggcaggactggggttacgtagcattattgctaacccggaagtgctgcatgcgctgaatccaatgtgggcggtgcatttcttccttgaatacaaaacggtttcttttattgcattaggggcagtggtgttgagcattacgggggtcgaggcgctgtatgctgatatggggcactttggtaagttccctattcgcctggcgtggttcaccgtcgtattaccttccttgacccttaattacttcggtcagggagcgctgttgttaaagaacccggaagcgattaagaacccgttcttcctgttggcaccggactgggcgctgatcccgctgctgatcatcgccgcactggcgacggtaattgccagccaggcggttatctctggcgtcttcagtttgacgcgtcaggcggtacgtctgggatatttgagcccgatgcgcattattcacacctccgaaatggagagtgggcaaatctatattccgtttgtgaactggatgctctatgtcgcggtcgtgattgtgattgtcagctttgagcactccagcaacctggcggcggcgtacgggattgcggtgaccggaaccatggtgctgacgtctattctcagcactaccgtggcacgtcagaactggcactggaataagtattttgttgcgctgatcctgattgctttcctttgtgtcgatattccattgttcaccgctaacctcgataaactgctctccggcggctggttgccattgagcctcggtactgtgatgtttatcgtgatgaccacctggaagagcgagcgtttccgcttgctgcggcggatgcatgaacatggtaactctctggaagcgatgattgctagcctggagaaaagtccgcctgttcgcgtgcccgggaccgcggtgtatatgagccgtgcaatcaacgtcattccctttgcgctgatgcataaccttaaacataacaaggtattgcatgagcgggtgattctgttaactctgcgcaccgaagacgctccatatgtccataacgtccgtcgggtacagattgaacaactgagccccactttctggcgcgtggtggcaagttatggttggcgagaaacgccaaacgtagaagaagttttccaccgctgcggtctggaaggattaagttgccggatgatggaaacctccttctttatgagccatgagagcttgatcctcggcaaacgcccgtggtatttgcgtctgcgcggcaagctgtacttgctgctgcaacgtaatgcgctgcgtgcaccagatcaatttgaaatcccgccaaacagggttatcgaactgggtactcaggtcgaaatctaacgccagacgcctcctttcttcataagggggcgtttttgttttcatggttaatcaccatgtaaaacgtttcgaggttgatcacatttccgtaacgtcacgatggttttcccaactcagtcaggattaaactgtgggtcagcgaaacgtttcgctgatggagaaaaaaatgaaaaaaggcaccgttcttaattctgatattagtagcgtgatctcccgtctgggacataccgatacgctggtggtgtgtgatgctggtttacccatccccaaaagtacaacgcgtatcgatatggcattaacccagggtgtaccttcttttatgcaggtgctgggcgtcgtcacaaatgaaatgcaggtcgaggcggccattatcgcggaagagatcaaacaccataatccgcaactccacgaaacgttgctcactcaccttgagcagctgcaaaaacaccagggaaataccattgaaattcgttacaccacgcatgaacaattcaaacaacaaaccgcagaaagtcaggcggtaattcgcagcggagaatgttctccgtatgcgaatatcattctctgtgctggcgtgacgttctgaggccgtcatggaagcattacttcagcttaaaggcatcgataaagccttcccgggcgtaaaagccctcagcggcgcagcgttaaatgtctatccgggccgcgtgatggcgctggtgggcgaaaacggcgcgggtaaatccaccatgatgaaagtgcttactggcatctatactcgcgatgccggtacgcttttatggctggggaaagaaacgacatttaccgggccaaaatcttcccaggaagccgggattgggattatccatcaggaactgaacctgatcccgcagttgaccattgccgaaaacattttcctcggtcgtgagtttgttaatcgctttggcaaaattgactggaaaaccatgtatgccgaagcggataaattgctggctaaacttaacctgcgctttaaaagcgacaagctggtgggcgatctttccatcggtgaccagcaaatggttgaaatcgccaaagtgctgagctttgagagcaaagtcatcattatggatgaaccgaccgatgcgctgaccgataccgaaaccgaatccctgttccgcgtcatccgcgagctgaaaagccaaggccgcggtattgtctatatctcccaccgcatgaaagaaatcttcgagatttgcgatgacgttaccgtttttcgtgatgggcaatttattgctgagcgcgaagtggcaagtctgaccgaagatagcctgattgagatgatggtgggtcgcaagctggaagatcaatatccgcacctggacaaagcgccgggagatatccgcctgaaagtcgataatctctgcggacctggcgttaacgatgtctcttttactttacgcaaaggcgaaattcttggcgtctctggtttgatgggcgcaggtcgtaccgaactgatgaaagtgctctacggcgcactaccgcgcaccagcggttacgtcaccctggatgggcatgaagtcgttacccgtagtccgcaggatggcctggcaaacggcattgtgtatatctccgaagaccgtaaacgtgacggtttagtgttgggcatgagtgtaaaagagaacatgagcctgacagcgctgcgctacttcagccgcgctggcggcagtttgaagcatgccgatgaacagcaggctgtgagtgatttcattcgtctgtttaatgtgaaaactccgagcatggaacaggcaattggtctgctttccggtggcaatcagcaaaaagtggcgattgcccgcggtctgatgacacgccccaaagtgttgatccttgatgaacctacccgtggcgtagatgtcggcgcgaaaaaagagatctatcaactgattaaccagttcaaagccgatggcttgagcatcattctggtgagtagcgagatgccagaagtattaggcatgagcgatcgcatcatcgtcatgcatgaagggcatctcagcggggaatttactcgtgagcaggccacccaggaagtgttaatggctgccgctgtgggcaagcttaatcgcgtgaatcaggagtaaaaaaatgacaacccagactgtctctggtcgccgttatttcacgaaagcgtggctgatggagcagaaaagccttatcgctctgctggtgctgatcgcgattgtcagcacgttaagcccgaactttttcaccatcaataacttattcaatattctccagcaaaccagtgtgaacgccattatggcggtcgggatgacgctggtgatcctgacgagcggcatcgacttaagcgtaggttctctgttggcgctgaccggcgcagttgctgcatctatcgtcggcattgaagtcaatgcgctggtggctgtcgctgctgctctcgcgttaggtgccgcaattggtgcggtaaccggggtgattgtagcgaaaggtcgcgtccaggcgtttatcgctacgctggttatgatgcttttactgcgcggcgtgaccatggtttataccaacggtagcccagtgaataccggctttactgagaacgccgatctgtttggctggtttggtattggtcgtccgctgggcgtaccgacgccagtctggatcatggggattgtcttcctcgcggcctggtacatgctgcatcacacgcgtctggggcgttacatctacgcgctgggcggcaacgaagcggcaacgcgtctttctggtatcaacgtcaataaaatcaaaatcatcgtctattctctttgtggtctgctggcaagcctggccgggatcattgaagtggcgcgtctctcctccgcacaacccacggcggggactggctatgagctggatgctattgctgcggtggttctgggcggtacgagtctggcgggcggaaaaggtcgcattgttgggacgttgatcggcgcattaattcttggcttccttaataatggattgaatttgttaggtgtttcctcctattaccagatgatcgtcaaagcggtggtgattttgctggcggtgctggtagacaacaaaaagcagtaataacgactacaggacatcttgaatatgaacatgaaaaaactggctaccctggtttccgctgttgcgctaagcgccaccgtcagtgcgaatgcgatggcaaaagacaccatcgcgctggtggtctccacgcttaacaacccgttctttgtaagcctgaaagatggcgcgcagaaagaggcggataaacttggctataacctggtggtgctggactcccagaacaacccggcgaaagagctggcgaacgtgcaggacttaaccgttcgcggcacaaaaattctgctgattaacccgaccgactccgacgcagtgggtaatgctgtgaagatggctaaccaggcgaacatcccggttatcactcttgaccgccaggcaacgaaaggtgaagtggtgagccacattgcttctgataacgtactgggcggcaaaatcgctggtgattacatcgcgaagaaagcgggtgaaggtgccaaagttatcgagctgcaaggcattgctggtacatccgcagcccgtgaacgtggcgaaggcttccagcaggccgttgctgctcacaagtttaatgttcttgccagccagccagcagattttgatcgcattaaaggtttgaacgtaatgcagaacctgttgaccgctcatccggatgttcaggctgtattcgcgcagaatgatgaaatggcgctgggcgcgctgcgcgcactgcaaactgccggtaaaagcgatgtgatggtcgtcggatttgacggtacaccggatggcgaaaaagcggtgaatgatggcaaactagcagcgactatcgctcagctacccgatcagattggcgcgaaaggcgtcgaaaccgcagataaagtgctgaaaggcgagaaagttcaggctaagtatccggttgatctgaaactggttgttaagcagtaattttaatcaggttgtatgacctgatggtgacataaatacgtcatcgacagatgaacgtgtaatataaagaaaagcagggcacgcgccaccctaacacggtggcgcattttatggacatcccgaatatgcaaaacgcaggcagcctcgttgttcttggcagcattaatgctgaccacattcttaatcttcaatcttttcctactccaggcgaaaccgtaaccggtaaccactatcaggttgcatttggcggcaaaggcgcgaatcaggctgtggctgctgggcgtagcggtgcgaatatcgcgtttattgcctgtacgggtgatgacagcattggtgagagcgttcgccagcagctcgccactgataacattgatattactccggtcagcgtgatcaaaggcgaaagtacaggtgtggcgctgatttttgttaatggcgaaggtgagaatgtcatcggtattcatgccggcgctaatgctgccctttccccggcgctggtggaagcgcaacgtgagcgtattgccaacgcgagtgcattattaatgcagctggaaagtccactcgaaagtgtgatggcagcggcgaaaatcgcccatcaaaataagactatcgttgcgcttaacccggctccggctcgcgaacttcctgacgaactgctggcgctggtggacattattacgccaaacgaaacggaagcagaaaagctcaccggtattcgtgttgaaaatgatgaagatgcagcgaaggcggcgcaggtactgcatgaaaaaggtatccgtactgtactgattactttaggaagtcgtggtgtatgggctagcgtgaatggtgaaggtcagcgcgttcctggattccgggtgcaggctgtcgataccattgctgccggagatacctttaacggtgcgttaatcacggcattgctggaagaaaaaccattgccagaggcgattcgttttgcccatgctgccgctgcgattgccgtaacacgtaaaggcgcacaaccttccgtaccgtggcgtgaagagatcgacgcatttttagacaggcagaggtgacgcttggctacaatgaaagatgttgcccgcctggcgggcgtttctaccagtacagtttctcacgttatcaataaagatcgcttcgtcagtgaagcgattaccgccaaagttgaagcggcgattaaagaactcaattacgcgccaagtgctctggcgcgtagcctcaaactcaatcaaacacataccattggcatgttgatcactgccagtaccaatcctttctatagtgaactggtgcgtggcgttgaacgcagctgcttcgaacgcggttatagtctcgtcctttgcaataccgaaggcgatgaacagcggatgaatcgcaatctggaaacgctgatgcaaaaacgcgttgatggcttgctgttactgtgcaccgaaacgcatcaacctagccgtgaaatcatgcaacgttatccgacagtgcctactgtgatgatggactgggctccgttcgatggcgacagcgatcttattcaggataacagcttgctgggcggagacttagcaacgcaatatctgatcgataaaggtcatacccgtatcgcctgtattaccggcccgctggataaaactccggcgcgcctgcggttggaaggttatcgggcggcgatgaaacgtgcgggtctcaacattcctgatggctatgaagtcactggtgattttgaatttaacggcgggtttgacgctatgcgccaactgctaagtcatccgctgcgtcctcaggccgtctttaccggaaatgacgctatggctgttggcgtttaccaggcgttatatcaggcagagttacaggttccgcaggatatcgcggtgattggctatgacgatatcgaactggcaagctttatgacgccaccattaaccactatccaccaaccgaaagatgaactgggggagctggcgattgatgtactcatccatcggataacccagccgacccttcagcaacaacgattacaacttactccgattctgatggaacgcggtagcgcttaattactcgctttcacttggaacgcggttcggcttagatttacgctgtcttttgatcaaattattaccatcggttgttttcagaagcatgaacattgctgcactagcaacagtaataatgcccattgtgataaacgtatagtggaattgttcgacagtcgttgtgccttccattccttcataaacgcgaaggacggccgcacttacagcaacgcctaaactaatgctcagttgctgcgtgaccgccagaacactgttaccgctgctggcattgtcatcggtcagatcggcaagtgtgatggtattcatcgcggtaaactgcgtgctcatagccatccctaatataaacaacggcaagatcagcatccatatagccattgctggactttgcaaagagaactgagcgatcattagcccaataatcaccgtgatccccactaacgtatggcgatagcccagacgacgtaagacttgggtaaccatgctttttgcaataatggaacctaacgctgtcggtgccatcatacagccagcaataaacgcctgataaccaaatcctacctgtaacatcaatggcataaggaacggtacacagccggtccccagacgggttgcaatattgcctacgataccgatgctgaaagtgcgggttttaaataaatctaaactaattaatgggtttggcgtgcgtcgtgcatggagaatatagagaagcagtaacccgatgctggtgacaattaccgtcaaggcaatccagctggcgacaatcttttccccgaatagctctattccgctactgaagagaacaaggctgaggccaaacagcaaaaagccagtgatatcgaatctgcgtcgtgcggtggtgaaattgggcatatgtttgcgcgcgtaaagaaggcccgcaatacctatggggatattgattaaaaatatccagtgccaggttgcccaggtgaccagcacgccgccaagaacggggcctaaaattggccccaccagacccggcatggcgacaaaattcaatactggaagaagttcattacgaggataagcgcgcagtaaggccagccgagcaacaggcatcatcattgcgccgcctatcccctgaataacccggaagacaaccagctgtggtaggctattagaaagtgcgcaggccagagaacccaatgtgaacagactcacggcaagggtaaaaatgcgacgcgtaccgaagcgatcggctagccatccgcttaccggaataagcatcgccaccgtcagcgtataactgatgatggcactttgcatcgcgagaggagaacgattaaggctatgagcgattgcgggtaaggcggtattaagaatagtggcatcaagtgcctgcatgaagaaggccatcgccgcgatccacggcaaacccgccatactgcgcttctttttatcgctcattcaatgtcctgttatcgggttatcacttatcaggactgcgtagcagcgcctgacaagctttaaatgccgcgtcgccatcgctttggataatcgcatcgacaatcgcctgatgcagatccagctttatcactgtgtcgctggtaatactcgtgaagtaagtgtgataaacgctatggaataggctggcgaaactggtcaaaaacggattggcgctcatttcatagatatgctcatgccaggccatatcgacttcgatccagcgttcacggcgaaagttctcttttaatgccgccatttcggccattaacgtattgagatgcgctttctgttccgcggtgccaaccgttgctgccagtaggcaggcttgcggctccagacagatacgcataaccagaaagtgatcgatgacctgatgaaagttctcttctgtcatccaccaggtaagcaattcctgatcaagaaaattccagttgctttgtggcatgacccgagtaccaattcgcggtcgcggtaaaaccatcccttttgccgttaacgttttgaccgcttcgcgtaccgctgtacgactcactccaaattgctcgcccagctcaatctcaccgggcaaaatggtgccgggttcatattcaccttttaagatccgttgcgccagcttctcagccagaacatagctaaggtttttctgtgcagctaactgttgtgcgcttaaaggcattacttatcttcctttttctttttattcctccttagtatgccaccaggaagtgtgattacggttgcaaaaacggcaaattgcttgttttatggcacattaacggggcttttgctgaaaaaatgcgcggtcagaaaattattttaaatttcctcttgtcaggccggaataactccctataatgcgccaccactgacacggaacaacggcaaacacgccgccgggtcagcggggttctcctgagaactccggcagagaaagcaaaaataaatgcttgactctgtagcgggaaagcgtattatgcacaccccgcgccgctgagaaaaagcaaagcggcactgctctttaacaatttatcagacaatctgtgtgggcactcgaagatacggattcttaacgtcgcaagacgaaaaatgaataccaagtctcaagagtgaacacgtaattcattacgaagtttaattctttgagcatcaaacttttaaattgaagagtttgatcatggctcagattgaacgctggcggcaggcctaacacatgcaagtcgaacggtaacaggaaacagcttgctgtttcgctgacgagtggcggacgggtgagtaatgtctgggaaactgcctgatggagggggataactactggaaacggtagctaataccgcataacgtcgcaagaccaaagagggggaccttcgggcctcttgccatcagatgtgcccagatgggattagctagtaggtggggtaacggctcacctaggcgacgatccctagctggtctgagaggatgaccagccacactggaactgagacacggtccagactcctacgggaggcagcagtggggaatattgcacaatgggcgcaagcctgatgcagccatgccgcgtgtatgaagaaggccttcgggttgtaaagtactttcagcggggaggaagggagtaaagttaatacctttgctcattaacgttacccgcagaagaagcatcggctaactccgtgccagcagccgcggtaatacggagggtgcaagcgttaatcggaattactgggcgtaaagcgcacgcaggcggtttgttaagtcagatgtgaaatccccgggctcaacctgggaactgcatctgatactggcaagcttgagtctcgtagaggggggtagaattccaggtgtagcggtgaaatgcgtagagatctggaggaataccggtggcgaaggcggccccctggacgaagactgacgctcaggtgcgaaagcgtggggagcaaacaggattagataccctggtagtccacgccgtaaacgatgtcgacttggaggttgtgcccttgaggcgtggcttccggagctaacgcgttaagtcgaccgcctggggagtacggccgcaaggttaaaactcaaatgaattgacgggggcccgcacaagcggtggagcatgtggtttaattcgatgcaacgcgaagaaccttacctggtcttgacatccacggaagttttcagagatgagaatgtgccttcgggaaccgtgagacaggtgctgcatggctgtcgtcagctcgtgttgtgaaatgttgggttaagtcccgcaacgagcgcaacccttatcctttgttgccagcggtccggccgggaactcaaaggagactgccagtgataaactggaggaaggtggggatgacgtcaagtcatcatggcccttacgaccagggctacacacgtgctacaatggcgcatacaaagagaagcgacctcgcgagagcaagcggacctcataaagtgcgtcgtagtccggattggagtctgcaactcgactccatgaagtcggaatcgctagtaatcgtggatcagaatgccacggtgaatacgttcccgggccttgtacacaccgcccgtcacaccatgggagtgggttgcaaaagaagtaggtagcttaaccttcgggagggcgcttaccactttgtgattcatgactggggtgaagtcgtaacaaggtaaccgtaggggaacctgcggttggatcacctccttaccttaaagaagcgttctttgcagtgctcacacagattgtctgataggaagtgaaaagcaaggcgtcttgcgaagcagactgatacgtccccttcgtctagaggcccaggacaccgccctttcacggcggtaacaggggttcgaatcccctaggggacgccacttgctggtttgtgagtgaaagtcacctgccttaatatctcaaaactcatcttcgggtgatgtttgagatatttgctctttaaaaatctggatcaagctgaaaattgaaacactgaacaacgaaagttgttcgtgagtctctcaaattttcgcaacacgatgatgaatcgaaagaaacatcttcgggttgtgaggttaagcgactaagcgtacacggtggatgccctggcagtcagaggcgatgaaggacgtgctaatctgcgataagcgtcggtaaggtgatatgaaccgttataaccggcgatttccgaatggggaaacccagtgtgtttcgacacactatcattaactgaatccataggttaatgaggcgaaccgggggaactgaaacatctaagtaccccgaggaaaagaaatcaaccgagattcccccagtagcggcgagcgaacggggagcagcccagagcctgaatcagtatgtgtgttagtggaagcgtctggaaaggcgcgcgatacagggtgacagccccgtacacaaaaatgcacatattgtgagctcgatgagtagggcgggacacgtggtatcctgtctgaatatggggggaccatcctccaaggctaaatactcctgactgaccgatagtgaaccagtaccgtgagggaaaggcgaaaagaaccccggcgaggggagtgaaaaagaacctgaaaccgtgtacgtacaagcagtgggagcacgcttaggcgtgtgactgcgtaccttttgtataatgggtcagcgacttatattctgtagcaaggttaaccgaataggggagccgaagggaaaccgagtcttaactgggcgttaagttgcagggtatagacccgaaacccggtgatctagccatgggcaggttgaaggttgggtaacactaactggaggaccgaaccgactaatgttgaaaaattagcggatgacttgtggctgggggtgaaaggccaatcaaaccgggagatagctggttctccccgaaagctatttaggtagcgcctcgtgaattcatctccgggggtagagcactgtttcggcaagggggtcatcccgacttaccaacccgatgcaaactgcgaataccggagaatgttatcacgggagacacacggcgggtgctaacgtccgtcgtgaagagggaaacaacccagaccgccagctaaggtcccaaagtcatggttaagtgggaaacgatgtgggaaggcccagacagccaggatgttggcttagaagcagccatcatttaaagaaagcgtaatagctcactggtcgagtcggcctgcgcggaagatgtaacggggctaaaccatgcaccgaagctgcggcagcgacgcttatgcgttgttgggtaggggagcgttctgtaagcctgcgaaggtgtgctgtgaggcatgctggaggtatcagaagtgcgaatgctgacataagtaacgataaagcgggtgaaaagcccgctcgccggaagaccaagggttcctgtccaacgttaatcggggcagggtgagtcgacccctaaggcgaggccgaaaggcgtagtcgatgggaaacaggttaatattcctgtacttggtgttactgcgaaggggggacggagaaggctatgttggccgggcgacggttgtcccggtttaagcgtgtaggctggttttccaggcaaatccggaaaatcaaggctgaggcgtgatgacgaggcactacggtgctgaagcaacaaatgccctgcttccaggaaaagcctctaagcatcaggtaacatcaaatcgtaccccaaaccgacacaggtggtcaggtagagaataccaaggcgcttgagagaactcgggtgaaggaactaggcaaaatggtgccgtaacttcgggagaaggcacgctgatatgtaggtgaagcgacttgctcgtggagctgaaatcagtcgaagataccagctggctgcaactgtttattaaaaacacagcactgtgcaaacacgaaagtggacgtatacggtgtgacgcctgcccggtgccggaaggttaattgatggggtcagcgcaagcgaagctcttgatcgaagccccggtaaacggcggccgtaactataacggtcctaaggtagcgaaattccttgtcgggtaagttccgacctgcacgaatggcgtaatgatggccaggctgtctccacccgagactcagtgaaattgaactcgctgtgaagatgcagtgtacccgcggcaagacggaaagaccccgtgaacctttactatagcttgacactgaacattgagccttgatgtgtaggataggtgggaggctttgaagtgtggacgccagtctgcatggagccgaccttgaaataccaccctttaatgtttgatgttctaacgtggacccgtgatccgggttgcggacagtgtctggtgggtagtttgactggggcggtctcctcctaaagagtaacggaggagcacgaaggttggctaatcctggtcggacatcaggaggttagtgcaatggcataagccagcttgactgcgagcgtgacggcgcgagcaggtgcgaaagcaggtcatagtgatccggtggttctgaatggaagggccatcgctcaacggataaaaggtactccggggataacaggctgataccgcccaagagttcatatcgacggcggtgtttggcacctcgatgtcggctcatcacatcctggagctgaagtaggtcccaagggtatggctgttcgccatttaaagtggtacgcgagctgggtttagaacgtcgtgagacagttcggtccctatctgccgtgggcgctggagaactgaggggggctgctcctagtacgagaggaccggagtggacgcatcactggtgttcgggttgtcatgccaatggcactgcccggtagctaaatgcggaagagataagtgctgaaagcatctaagcacgaaacttgccccgagatgagttctccctgactccttgagagtcctgaaggaacgttgaagacgacgacgttgataggccgggtgtgtaagcgcagcgatgcgttgagctaaccggtactaatgaaccgtgaggcttaaccttacaacgccgaagatgttttggcggatgagagaagattttcagcctgatacagattaaatcagaacgcagaagcggtctgatgaaacagaatttgcctggcggccgtagcgcggtggtcccacctgaccccatgccgaactcagaagtgaaacgccgtagcgccgatggtagtgtggggtctccccatgcgagagtagggaactgccaggcatcaaattaagcagtaagccggtcataaaaccggtggttgtaaaagaattcggtggagcggtagttcagtcggttagaatacctgcctgtcacgcagggggtcgcgggttcgagtcccgtccgttccgccaccctaattaggggcgtagttcaattggtagagcaccggtctccaaaaccgggtgttgggagttcgagtctctccgcccctgccagaaatcatccttagcgaaagctaaggattttttttatctgaaataaccctctccgaagtaaatccttctaccggcatccttgccagccattcatattaatacacttcatccagcacgttaattttcaaaagatcgcgaatcaacgcatttttatcgctattttgcagccatatggcataaagcggccgactaagtgttgtgctatcgacaacggtatgcaggccgccttttttacgcgcccagctgacgggtagccaggtgcaaccattaagcatcgcaatctgttgctgtgccagttcagcagaactggttgtcagaatgggcacttcgtcagcaccgatcaaacctgcctcatgctgttgaaaatctggcccccactcaagtcgcagataattaagatctccctttagtttactaggggcactggtataaagcgctaaagtgaaatatcccagcaactgactactaaattcgtccattttgggcgcttcagtggtaataagaagatcaagctggcgttcatgcagctgttttaccagagactgccgttgggcaattcgcgcttcgaactgtaagcctgtatgggcatcctgattttgatacaagcgtcccagccactgattaagcatacattcccacaagctggcgctggcaccgatagaaaactcgttatgtcgactggtatgcgccacctccttacgggcggcctgccaggtgctcatgagcgtttctgcataaggcagtagtttttcaccggcagcggttaaacggatattgtttctgtggcgggtgaaaaggttcacacccagttgattttccagttgtctgattcgaaagctcactgcactctgggtcagatagaggctttcagccgctcgaccaaagtgacgcgttcggctaacttccaggaaagtttttaacaattccgtatccacagtgctctccgcaaaattatttgtcgttatgatttaaatgttttgttttacactctgtcaagcgtaactaatactccgcgccataactagctcggtcaaagaattaggagcgtgcaggatggcggaaagctttacgacgactaatcgatatttcgacaataaacattatccacgtggattctctcgtcatggtgatttcaccatcaaagaggcacaactgcttgagcgtcatggttatgccttcaatgagttggatcttggcaaacgcgagccggttaccgaggaagagaaactcttcgtagcagtatgccgtggcgaacgtgagccagtgacagaagcagaacgcgtgtggtccaagtatatgacgcgtattaagcgtccaaaacgttttcacaccctttccggcggtaaaccgcaggttgaaggtgctgaagactacaccgattctgacgattaataaaaagggcgaaatgccctttttttatgtcagtagtttctgcagatggatgagcaaacggtcaatcgctcgatagctaactgcctcctgcaaatgctgacgtgtgataatgtcagactgatcaatatcagcaatggttcgtgcaactttcaataaccgctgccaggcacgaatgcttaaccccagatggatcagtgttccttccaaccacatcgcatcttcgctctcaagtttgcagaattggcgtatttccggactatccagccaggcattcagtttattctgccgcttaaattggcgctctctggcggccattacgcgttgtttaacggtggcgctgctttctcccggcactaccgttttactcaaaatgccggggggtggtaatgggatctccagactgagatcgaagcggtcgagaaagggcccgctgagccggttgagataacgtaatgtctgttctggcgtgcagcggttatggtttccctgataatgtccggtagggctgggattcatcgccgcaacaagctggaaacgggctggataggttatttttgctcgtgtgcgactaagatggatctgcccggattcaatcggctctcgcaaggcatccagtgtacgccgttcaaattcaggtagctcatcaagaaaaagcacgccgttatgcgccaggctaatttcaccgggccctggaattgcgccaccgcctaccatcgcagttaagcttgcactgtgatgaggactgcggaacgggcgctgccgccattgtttttgtacactttcagcatttaccagacttaatatcgcagcactctccagtgcctcttcattgcttaaatctggcaacaggccattaatacggctggcgagcattgttttacctgttcccggcggcccaatcagtaaaaggttgtgcccgccagcagcggtaatttccagtcctcgctttccttgttcctgaccgataacatcactgagatcatgttgtagcgcccgggatactgcatcagttggtttcgggcgttcgagagcgtgcttaccttccagaaacgcacagacagcttgcagatgatcggctatcaggcatccttcaccgttaattagccccacttcatcttcgttatctttcgcgacgataatttttctgccgctcttaatagcttcagttgcactggagattgcgccgggaacgccacgcagagcgcctgtaagcgccagttctccgactaattcatattcatctaacttattggctgtaagctgttcactggccgccagcaacgcaatggcgataggtaaatcatatcgtcccccttcttttggcagatcagctggagccaggttgatggtgatttttttcgccggatattcatatccgctattgataatggcgctgcgcacgcgatcgcgagcttcttttaccgttgtttctggtaagcccaccatcgttaagccgggtagacctttactgatatgtacctcaacagtgatcgggggcgcatttactcccagggctgcgcgggtatgaacaatactcagactcataagccctccttgagtcaccattatgtgcataagatatcgctgctgtagcccgctaattcgtgaattttagtggctgattcctgtttatttgtgcaagtgaagttgagttgttctggcggtggaatgatgctcgcaaaaatgcagcggacaaaggatgaactacgaggaagggaacaacattcatactgaaattgaatttttttcactcactattttatttttaaaaaacaacaatttatattgaaattattaaacgcatcataaaaatcggccaaaaaatatcttgtactatttacaaaacctatggtaactctttaggcattccttcgaacaagatgcaagaaaagacaaaatgacagcccttctacgagtgattagcctggtcgtgattagcgtggtggtgattattatcccaccgtgcggggctgcacttggacgaggaaaggcttaaagatcaagccttaacgaactaagacccccgcaccgaaaggtccgggggttttttttgaccttaaaaacataaccgaggagcagacaatgaataacagcacaaaattctgtttctcaagattcaggacggggaactaactatgaatggcgcacagtgggtggtacatgcgttgcgggcacagggtgtgaacaccgttttcggttatccgggtggcgcaattatgccggtttacgatgcattgtatgacggcggcgtggagcacttgctatgccgacatgagcagggtgcggcaatggcggctatcggttatgctcgtgctaccggcaaaactggcgtatgtatcgccacgtctggtccgggcgcaaccaacctgataaccgggcttgcggacgcactgttagattccatccctgttgttgccatcaccggtcaagtgtccgcaccgtttatcggcactgacgcatttcaggaagtggatgtcctgggattgtcgttagcctgtaccaagcacagctttctggtgcagtcgctggaagagttgccgcgcatcatggctgaagcattcgacgttgcctgctcaggtcgtcctggtccggttctggtcgatatcccaaaagatatccagttagccagcggtgacctggaaccgtggttcaccaccgttgaaaacgaagtgactttcccacatgccgaagttgagcaagcgcgccagatgctggcaaaagcgcaaaaaccgatgctgtacgttggcggtggcgtgggtatggcgcaggcagttccggctttgcgtgaatttctcgctgccacaaaaatgcctgccacctgtacgctgaaagggctgggcgcagtagaagcagattatccgtactatctgggcatgctggggatgcacggcaccaaagcggcaaacttcgcggtgcaggagtgtgacctgctgatcgccgtgggcgcacgttttgatgaccgggtgaccggcaaactgaacaccttcgcgccacacgccagtgttatccatatggatatcgacccggcagaaatgaacaagctgcgtcaggcacatgtggcattacaaggtgatttaaatgctctgttaccagcattacagcagccgttaaatcaatgactggcagcaacactgcgcgcagctgcgtgatgaacattcctggcgttacgaccatcccggtgacgctatctacgcgccgttgttgttaaaacaactgtcggatcgtaaacctgcggattgcgtcgtgaccacagatgtggggcagcaccagatgtgggctgcgcagcacatcgcccacactcgcccggaaaatttcatcacctccagcggtttaggtaccatgggttttggtttaccggcggcggttggcgcacaagtcgcgcgaccgaacgataccgttgtctgtatctccggtgacggctctttcatgatgaatgtgcaagagctgggcaccgtaaaacgcaagcagttaccgttgaaaatcgtcttactcgataaccaacggttagggatggttcgacaatggcagcaactgttttttcaggaacgatacagcgaaaccacccttactgataaccccgatttcctcatgttagccagcgccttcggcatccatggccaacacatcacccggaaagaccaggttgaagcggcactcgacaccatgctgaacagtgatgggccatacctgcttcatgtctcaatcgacgaacttgagaacgtctggccgctggtgccgcctggcgccagtaattcagaaatgttggagaaattatcatgatgcaacatcaggtcaatgtaagcgctcgcttcaatccagaaaccttagaacgtgttttacgcgtggtgcgtcatcgtggtttccacgtctgcagtatgaatatggccgccgccagcgatgcacaaaatataaatatcgaattgaccgttgccagcccacggagcgtcgacttactgtttagtcagttaaataaactggtggacgtcgcacacgttgccatctgccagagcacaaccacaagtcaacaaatccgcgcctgagcgcaaaaggaatataaaaatgaccacgaagaaagctgattacatttggttcaatggggagatggttcgctgggaagacgcgaaggtgcatgtgatgagccacgcgctgcactatggcactagcgtttttgaaggcatccgttgctacgacagccacaaaggaccggttgtattccgccatcgtgagcatatgcagcgtctgcatgactccgccaaaatctatcgcttcccggttagccagagcattgatgagctgatggaagcttgtcgtgacgtgatccgcaaaaacaatctcaccagcgcctatatccgtccgctgatcttcgtcggtgatgttggcatgggagtaaacccgccagcgggatacagtaccgacgtgattatcgctgctttcccgtggggagcgtatctgggcgcagaagcgctggagcaggggatcgatgcgatggtttcctcctggaaccgcgcagcaccaaacaccatcccgacggcggcaaaagccggtggtaactacctctcttccctgctggtgggtagcgaagcgcgccgccacggttatcaggaaggtatcgcgctggatgtgaacggttatatctctgaaggcgcaggcgaaaacctgtttgaagtgaaagatggtgtgctgttcaccccaccgttcacctcctccgcgctgccgggtattacccgtgatgccatcatcaaactggcgaaagagctgggaattgaagtacgtgagcaggtgctgagccgcgaatccctgtacctggcggatgaagtgtttatgtccggtacggcggcagaaatcacgccagtgcgcagcgtagacggtattcaggttggcgaaggccgttgtggcccggttaccaaacgcattcagcaagccttcttcggcctcttcactggcgaaaccgaagataaatggggctggttagatcaagttaatcaataaatacaaaaaatgggacggcacgcaccgtcccatttacgagacagacactgggagtaaataaagtatgcctaagtaccgttccgccaccaccactcatggtcgtaatatggcgggtgctcgtgcgctgtggcgcgccaccggaatgaccgacgccgatttcggtaagccgattatcgcggttgtgaacagcttcacccaatttgtaccgggtcacgtccatctgcgcgatctcggtaaactggtcgccgaacaaattgaagcggctggcggcgttgccaaagagttcaacaccattgcggtggatgatgggattgccatgggccacggggggatgctttatagtctgccatctcgcgaactgatcgctgattccgttgagtatatggtcaacgcccactgcgccgacgccatggtctgcatctctaactgcgacaaaatcaccccggggatgctgatggcttccctgcgcctgaatattccggtgatctttgtttccggcggcccgatggaggccgggaaaaccaaactttccgatcagatcatcaagctcgatctggttgatgcgatgatccagggcgcagacccgaaagtatctgactcccagagcgatcaggttgaacgttccgcgtgtccgacctgcggttcctgctccgggatgtttaccgctaacagtatgaactgcctgaccgaagcgctgggcctgagccagccgggcaacggcagcctgctggcaacccacgccgaccgtaagcagctgttccttaatgctggtaaacgcattgttgaattgaccaaacgttattacgagcaaaacgacgaaagtgcactgccgcgtaatatcgccagtaaggcggcgtttgaaaacgccatgacgctggatatcgcgatgggtggaagcactaacaccgtacttcacctgctggcggcggcgcaggaagcggaaatcgacttcaccatgagtgatatcgataagctttcccgcaaggttccacagctgtgtaaagttgcgccgagcacccagaaataccatatggaagatgttcaccgtgctggtggtgttatcggtattctcggcgaactggatcgcgcggggttactgaaccgtgatgtgaaaaacgtacttggcctgacgttgccgcaaacgctggaacaatacgacgttatgctgacccaggatgacgcggtaaaaaatatgttccgcgcaggtcctgcaggcattcgtaccacacaggcattcagccaagattgccgttgggatacgctggacgacgatcgcgccaatggctgtatccgcagcctggaacacgcctacagcaaagacggcggcctggcggtgctctacggtaactttgcggaaaacggctgcatcgtgaaaacggcaggcgtcgatgacagcatcctcaaattcaccggcccggcgaaagtgtacgaaagccaggacgatgcggtagaagcgattctcggcggtaaagttgtcgccggagatgtggtagtaattcgctatgaaggcccgaaaggcggtccggggatgcaggaaatgctctacccaaccagcttcctgaaaagtatgggtctcggcaaagcctgtgcgctgatcaccgacggtcgtttctctggtggcacctctggtctttccatcggccacgtcagtccggaagcggcaagcggcggcagcattggcctgattgaagatggtgacctgatcgctatcgacatcccgaaccgtggcattcagttacaggtaagcgatgccgaactggcggcgcgtcgtgaagcgcaggacgctcgaggtgacaaagcctggacgccgaaaaatcgtgaacgtcaggtctcctttgccctgcgtgcttatgccagcctggcaaccagcgccgacaaaggcgcggtgcgcgataaaagcaaactggggggttaataatggctgacagccaacccctgtccggtgctccggaaggtgccgaatatttaagagcagtgctgcgcgcgccggtttacgaggcggcgcaggttacgccgctacaaaaaatggaaaaactgagcagccgtcttgataacgtcattctggtgaagcgcgaagatcgccagccagtgcacagctttaagctgcgcggcgcatacgccatgatggcgggcctgacggaagaacagaaagcgcacggcgtgatcactgcttctgcgggtaaccacgcgcagggcgtcgcgttttcttctgcgcggttaggcgtgaaggccctgatcgttatgccaaccgccaccgccgacatcaaagtcgacgcggtgcgcggcttcggcggcgaagtgctgctccacggcgcgaactttgatgaagcgaaagccaaagcgatcgaactgagtcagcagcaggggttcacctgggtgccgccgttcgaccatccgatggtgattgccgggcaaggcacgctggcgctggaactgctccagcaggacgcccatctcgaccgcgtatttgtgccagtcggcggcggcggtctggctgctggcgtggcggtgctgatcaaacaactgatgccgcaaatcaaagtgatcgccgtagaagcggaagactccgcctgcctgaaagcagcgctggatgcgggtcatccggttgatctgccgcgcgtagggctatttgctgaaggcgtagcggtaaaacgcatcggtgacgaaaccttccgtttatgccaggagtatctcgacgacatcatcaccgtcgatagcgatgcgatctgtgcggcgatgaaggatttattcgaagatgtgcgcgcggtggcggaaccctctggcgcgctggcgctggcgggaatgaaaaaatatatcgccctgcacaacattcgcggcgaacggctggcgcatattctttccggtgccaacgtgaacttccacggcctgcgctacgtcagtgaacgctgcgaactgggcgaacagcgtgaagcgttgttggcggtgaccattccggaagaaaaaggcagcttcctcaaattctgccaactgcttggcgggcgtagcgtcaccgagttcaactaccgttttgccgatgccaaaaacgcctgcatctttgtcggtgtgcgcctgagccgcggcctcgaagagcgcaaagaaattttgcagatgctcaacgacggcggctacagcgtggttgatctctccgacgacgaaatggcgaagctacacgtgcgctatatggtcggcggacgtccaagccatccgttgcaggaacgcctctacagcttcgaattcccggaaagtccgggcgcgctgctgcgcttcctcaacacgctgggtacgtactggaacatttctttgttccactatcgcagccatggcaccgactacgggcgcgtactggcggcgttcgaacttggcgaccatgaaccggatttcgaaacccggctgaatgagctgggctacgattgccacgacgaaaccaataacccggcgttcaggttctttttggcgggttaaggaaaaatgcctgatagcgcttcgcttatcaggcctacccgcgcgacaacgtcatttgtggttcggcaaaatcttccagaatgcctcaattagcggctcatgtagccgctttttctgcgcacacacgcccagctcaaacggcgttttctcatcgctgcgctctaaaatcatcacgcggttacgcaccggttcggggctgttttccagcaccacttccggcaacaatgccacgccacagccgagtgccaccatgcttaccatcgcttcatgcccgccaaccgtggcgtaaatcatcgggttactgattttattgcgtcgaaaccacagttcaatgcggcggcgtaccggcccctgatcggccataataaacggcaccgtactccagtccggcttctctacgctcacctgattacgcaccgggcagggcagcgcgggggcaatcagcactactgccagattctccagcatgctaaacgccactgcgccgggcaaggtttccggtttacccgcaatcgccagatccgcttcaccagtgaccaccttttccatcgcatctgccgcatcaccagtagtaagtttaatctccacgctcgggtgttccgcgcggaagcgatccagaatcggcggcagatggctgtaggcagcggtcacgctgcagaagatatgtaattcgccagagaggctcggcccttgctgatcgatggtgtggcgcaactgctgatactgcaacagcgtttgctgggcgaaaacgcgcagctcttcgcccgcttcagtcagcgtcaccgtgcggttatcgcgcacaaacagcggctgaccgagatcttcttccaggcgctgaatctgccgactgagcgtggatgggctaacgtgcatcgcccgcgcgctgcggccaaaatggcggctttccgccagatgcaggaaggttttcagatcgcgtaaatccacagggacagccctcgatgttgacgttgcaaaaattgcaatgtgacgttgtgaatatatcaatttccgcaataaatttcctgtcatatagtgaattcaatctcgcaaacgcgaaccgaacaataagaagcacaacatcacgaggaatcaccatggctaactacttcaatacactgaatctgcgccagcagctggcacagctgggcaaatgtcgctttatgggccgcgatgaattcgccgatggcgcgagctaccttcagggtaaaaaagtagtcatcgtcggctgtggcgcacagggtctgaaccagggcctgaacatgcgtgattctggtctcgatatctcctacgctctgcgtaaagaagcgattgccgagaagcgcgcgtcctggcgtaaagcgaccgaaaatggttttaaagtgggtacttacgaagaactgatcccacaggcggatctggtgattaacctgacgccggacaagcagcactctgatgtagtgcgcaccgtacagccactgatgaaagacggcgcggcgctgggctacagccacggtttcaacatcgtcgaagtgggcgagcagatccgtaaagatatcaccgtagtgatggttgcgccgaaatgcccaggcaccgaagtgcgtgaagagtacaaacgtgggttcggcgtaccgacgctgattgccgttcacccggaaaacgatccgaaaggcgaaggcatggcgattgccaaagcctgggcggctgcaaccggtggtcaccgtgcgggtgtgctggaaagctccttcgttgcggaagtgaaatctgacctgatgggcgagcaaaccatcctgtgcggtatgttgcaggctggctctctgctgtgcttcgacaagctggtggaagaaggtaccgatccagcatacgcagaaaaactgattcagttcggttgggaaaccatcaccgaagcactgaaacagggcggcatcaccctgatgatggaccgtctctctaacccggcgaaactgcgtgcttatgcgctttctgaacagctgaaagagatcatggcacccctgttccagaaacatatggacgacatcatctccggcgaattctcttccggtatgatggcggactgggccaacgatgataagaaactgctgacctggcgtgaagagaccggcaaaaccgcgtttgaaaccgcgccgcagtatgaaggcaaaatcggcgagcaggagtacttcgataaaggcgtactgatgattgcgatggtgaaagcgggcgttgaactggcgttcgaaaccatggtcgattccggcatcattgaagagtctgcatattatgaaagtctgcacgagctgccgctgattgccaacaccatcgcccgtaagcgtctgtacgaaatgaacgtggttatctctgataccgctgagtacggtaactatctgttctcttacgcttgtgtgccgttgctgaaaccgtttatggcagagctgcaaccgggcgacctgggtaaagctattccggaaggcgcggtagataacgggcaactgcgtgatgtgaacgaagcgattcgcagccatgcgattgagcaggtaggtaagaaactgcgcggctatatgacagatatgaaacgtattgctgttgcgggttaagtgcgcgctgatgccctcaccccgaccctctcccacagggagagggagaaaacactcaaggccttctcctggagaaggccttgctattagttgcggtacagcaccttaatgatgtgatatccgaactgggtgtgcagcgggccggtcggctccagtaccggacaagagaaaaccactttatcgaacgccggaaccatctgaccctggcggaattcacctaaatcaccgccgcgtttgccacttgggcaaatggagtgtttcttcgccagcttgccgaaatcggccccgttcttaatctgctcgagaagatccagagccagtttctcttcttttacaaggatatgcagtgctgctgctgtttttgccatgatcgtgccttgagtgaataattgtcaggcggcgattttagcatgatccgcagatgctaacgtaattgtcagtcagggagtggctggtacatatatggcaaaagcccggaaaatccgggcttcgcaggtccctcaaggggagaaaacttagggcctctatgggctacaaagtcattatcggggatggttattttattgtcaatttatgaggcttatggcattgatactcttgatgaccgccctctgtatgtctgcaaccaactcatgtggcaaacattgattaagataccctctgtaagtccttgctctgtttaatctgtttcgactgacttgttgtaccaggtcggctttggcccaacgaatctgctgatcaaagaattgcaggtcattgataacattactggctatttcaacatgcattccacgttttaacttgtctggtcggctgtggttgataatggaacgacgatgcatgcgttgccattaatttttccgttgagcacgacaactaacctgttttttatcatttcaggaggaatgcggccatcgtaatacgtcgtgctgaacggtccattttggctaacaggatagttaccaaagttgcattccagtatttcaccaaccttagggctgaaattaatcgccacgagtaaacctctccttagtaaactctgaaaaagtaataacacaacgttacgacccgatattttctaagtctaatggattcacgatgaactccgatttcggtcttctctctctgatttaaacatccgcagccaaccggttagcggcttacacgcggtcacattcaaatgcgattctgctacaatcctccccccgttcgaagattgagcaatacacctatgcgtctaaaccccggccaacaacaagctgtcgaattcgttaccggcccctgcctggtgctggcgggcgcgggttccggtaaaactcgtgttatcaccaataaaatcgcccatctgatccgcggttgcggttatcaggcgcggcacattgcggcggtgacctttactaataaagcagcgcgcgagatgaaagagcgtgtagggcagacgctggggcgcaaagaggcgcgtgggctgatgatctccactttccatacgttggggctggatatcatcaaacgcgagtatgcggcgcttgggatgaaagcgaacttcagcttgtttgacgataccgatcagcttgctttgcttaaagagttgaccgaggggctgattgaagatgacaaagttctcctgcaacaactgattagcaccatctctaactggaagaatgatctcaaaacaccgtcccaggcggcagcaagtgcgattggcgagcgggaccgtatttttgcccattgttatgggctgtatgatgcacacctgaaagcctgtaacgttctcgacttcgatgatctgattttattgccgacgttgctgctgcaacgcaatgaagaagtccgcaagcgctggcagaacaaaattcgctatctgctggtggatgagtatcaggacaccaacaccagccagtatgagctggtgaaactgctggtgggcagccgcgcgcgctttaccgtggtgggtgacgatgaccagagcatctactcctggcgcggtgcacgtccgcaaaacctggtgctgctgagtcaggattttccggcgctgaaggtgattaagcttgagcagaactatcgctcttccgggcgtattctgaaagcggcgaacatcctgatcgccaataacccgcacgtctttgaaaagcgtctgttctccgaactgggttatggcgcggagctaaaagtattaagcgcgaataacgaagaacatgaggctgagcgcgttactggcgagctgatcgcccatcacttcgtcaataaaacgcagtacaaagattacgccattctttatcgcggtaaccatcagagccgggtgtttgaaaaattcctgatgcaaaaccgcatcccgtacaaaatatctggtggtacgagctttttctctcgtcctgaaatcaaggacttgctggcttatctgcgcgtgctgactaacccggacgatgacagcgcatttctgcgtatcgttaacacgccgaagcgagagattggcccggctacgctgaaaaagctgggtgagtgggcgatgacgcgcaataaaagcatgtttaccgccagctttgatatgggcctgagtcagacgcttagcggacgtggttatgaagcattgacccgcttcactcactggttggcagaaatccagcgtctggcggagcgggagccgattgccgcggtgcgtgatctgatccatggcatggattatgaatcctggctgtacgaaacaagccccagcccgaaagccgccgaaatgcgcatgaagaacgtcaaccaactgtttagctggatgacggagatgctggaaggcagtgaactggatgagccgatgacgctcacccaggtggtgacgcgctttactttgcgcgacatgatggagcgtggtgagagtgaagaagagctggatcaggtgcaactgatgactctccacgcgagcaaagggctggagtttccttatgtctacatggtcggtatggaagaagggtttttgccgcaccagagcagcatcgatgaagataatatcgatgaggagcggcggctggcctatgtcggcattacccgcgcccagaaggaattgacctttacgctgtgtaaagaacgccgtcagtacggcgaactggtgcgcccggagccgagccgctttttgctggagctgccgcaggatgatctgatttgggaacaggagcgcaaagtggtcagcgccgaagaacggatgcagaaagggcaaagccatctggcgaatctgaaagcgatgatggcggcaaaacgagggaaataatcaaggccggaaaagatgcgtcagcatcgcatccggcacttactcattaatgcacttccagcggccagtggacatagctctgccactggctttcctgagcaataatctctttacccagcggatgttgggttagccaaccttgcggaagcgtcaaggtcaacagttcatggttagcctgtaatgtcatctctggcacgagatcgtcacggcgacggctggcaaaaatgatggccaggcgtagtaaacggcagagttgttctgcgacgcgcggcggtacggcattttgctgatgcaggctactgagatcgaccggattagtctggttgagcagtagcgtcgccagcaattttttctgtgcgggggtaaaaccgggaagatccagattacgcaccagataagcagcgtgttgcggcgcttgtttgaagtcaacgctcaggccgatttcatgaagctgacaggcgctgatgagcaaatcgcggcttattgcttcaagatgccattcgttttccacctgatcgaagaagttagccgcaactttggctacgcgctgtgcctgatcaatatcgatcataaagcggcgttgaatattacgcagcgtacggctgcgaatatcctgctcgacggccagatgcaacatgccgtagaccaggccttcacgcagcgcaccgcccgccagggtcatacactgaatattcagttcggtaaaaatggcgatcaggatcgccagaccactcgggaacactaacgcacgttccagcgtcagcccgtcaatctccagttcctccagccgaccgcaatgaatggctcgctgtttcaattgctgcaacttttccagggtaatgcgttcatccatcccctgtgccatcatgatttcctgtaacgcctgcacggtgccggaagcaccaacgcacactttccagccgtgataccgtaattcatcggcaaccggacgtaacacttcgcgtgccgctttttctgcagcatcaaaattttcctgccccagattacgatcggcaaaatagcgttccagccaggtgacgcagcccatgctcaggctgaacaagctggtggtttgtgcacccgtgccggttaccagttcagtactggctccgcctatatccaccaccaggcgctgatcggcaccaccagtggtgtgagcaacgccctgataaatcagacgtgcttcctcttcaccgctgatcacctgtaccggacaaccgagaatttcctgcgctttggcaataaaatcacccgcattgacggcaaggcgtaacgtcgccgtagcgacaacgcgaatttggctgggaggaatatcttgcagacgttcagcaaacaggcgcaaacattgccaaccgcgctccattgcttcattggagagggcattttcgctattcaggccagcagccagacgcactttgcgttttattcgcgtcagcgtctggatgcttccagccacctcgcgcacaaccagcatatgaaaactattgctaccgagatcaatggctgcatacaggctgctggtggaacccatactcttcatccttcaatctgtctctgtgttggctgcattctttcacctgaatcacttactacagtaagctcatcgggattcattctcttgccatcttgatacagtttgaatgattttgagtatgacattttttatttaaccactacgacgacgattacgcggagcgccagtacgacgcggaccattgcctgtgcgcgggcgcgtgaggcgcagcggttttggcagatcggtcatcaatgcgtccggattgtatttgcttaccggaatactgtgaccaatataggtctcaatagcaggcaaattcaatgcatactcttcacacgccaggctgatagagtgaccgcttgcgcctgcgcgacctgtacgaccaatacggtgaacgtaatcttcacagtcatcgggtaaatcgtagttaaagacgtgcgtcactgccggaatatgcaaaccacgcgcggcaacgtcggtggcaaccagaatatccagatcgccacgggtaaattcatcaagaatacgcagacgttttttctgcgcgacatcgcctgtcaataaaccgacacgatgaccatctgctgccaggtggccccagatctcttcacaacggtgtttggtgttggcgaaaataatcgctctgtctggccactcttcttcgatcagcgtttgcagcaaacgcattttttcttcgttagaagggtagaaaagctcttctttaatacggtggcccgttttctgttccggttccacttcaatatattcggcattgttcatctgctcgaacgccagttcacgtacccggtagctaagcgtggcggagaacagcatgttgaggcgctggtttgcaggcggcatacggcggaacagccagcggatatctttaataaagcccagatcgtacatgcgatcggcttcgtccagtaccaccacctgaatggcaccgaggttaatgtggttctgcttggcgtagtcaattaaacgccccgtggtgccaatcagaatgtcaacgccgctttccagcactttcagctgtttgtcgtagccatcaccaccgtaagccagacccagcttcaggccagtagcttccgccagcggttctgcgtcggcatggatctgcacggcaagttcacgcgtcggtgccataattaaggcacgcggctgattcaccttgcgatcggcaatcgcaggatgagagagaagataatgaaacgtactcgtaagaaacgccatcgttttcccggtaccggtttgcgcctgcccggctacgtcacgacccgccagcgtcagcggaagggccagtgcctgaatgggcgtacagttatgaaacccttttttttcaagggcttctacaaccttcggatgcagggcgaagtcggaaaacttctgttctgttaaatgtgttttgctcatagtgtggtagaatatcagcttactattgctttacgaaagcgtatccggtgaaataaagtcaacctttagttggttaatgttacaccaacaacgaaaccaacacgccaggcttattcctgtggagttatatatgagcgataaaattattcacctgactgacgacagttttgacacggatgtactcaaagcggacggggcgatcctcgtcgatttctgggcagagtggtgcggtccgtgcaaaatgatcgccccgattctggatgaaatcgctgacgaatatcagggcaaactgaccgttgcaaaactgaacatcgatcaaaaccctggcactgcgccgaaatatggcatccgtggtatcccgactctgctgctgttcaaaaacggtgaagtggcggcaaccaaagtgggtgcactgtctaaaggtcagttgaaagagttcctcgacgctaacctggcgtaagggaatttcatgttcgggtgccccgtcgctaaaaactggacgcccggcgtgagtcatgctaacttagtgttgacttcgtattaaacataccttattaagtttgaatcttgtaatttccaacgcttcccgttttatcttaaatgcgaagtgaacagatttctggcagcagtctcaatccgtcttgtcgtttcagttctgcgtactctcctgtgaccaggcagcgaaaagacatgagtcgatgaccgtaaacaggcatggatgatcctgccataccattcacaacattaagttcgagatttaccccaagtttaagaactcacaccactatgaatcttaccgaattaaagaatacgccggtttctgagctgatcactctcggcgaaaatatggggctggaaaacctggctcgtatgcgtaagcaggacattatttttgccatcctgaagcagcacgcaaagagtggcgaagatatctttggtgatggcgtactggagatattgcaggatggatttggtttcctccgttccgcagacagctcctacctcgccggtcctgatgacatctacgtttcccctagccaaatccgccgtttcaacctccgcactggtgataccatctctggtaagattcgcccgccgaaagaaggtgaacgctattttgcgctgctgaaagttaacgaagttaacttcgacaaacctgaaaacgcccgcaacaaaatcctctttgagaacttaaccccgctgcacgcaaactctcgtctgcgtatggaacgtggtaacggttctactgaagatttaactgctcgcgtactggatctggcaagtcctatcggtcgtggtcagcgtggtctgattgtggcaccgccgaaagccggtaaaaccatgctgctgcagaacattgctcagagcattgcttacaaccacccggattgtgtgctgatggttctgctgatcgacgaacgtccggaagaagtaaccgagatgcagcgtctggtaaaaggtgaagttgttgcttctacctttgacgaacccgcatctcgccacgttcaggttgcggaaatggtgatcgagaaggccaaacgcctggttgagcacaagaaagacgttatcattctgctcgactccatcactcgtctggcgcgcgcttacaacaccgttgttccggcgagtggtaaagtgttgaccggtggtgtggatgccaacgccctgcatcgtccgaaacgcttctttggtgcggcgcgtaacgtggaagagggcggcagcctgaccattatcgcgacggcgcttatcgataccggttctaaaatggacgaagttatctacgaagagtttaaaggtacaggcaacatggaactgcacctctctcgtaagatcgctgaaaaacgcgtcttcccggctatcgactacaaccgttctggtacccgtaaagaagagctgctcacgactcaggaagaactgcagaaaatgtggatcctgcgcaaaatcattcacccgatgggcgaaatcgatgcaatggaattcctcattaataaactggcaatgaccaagaccaatgacgatttcttcgaaatgatgaaacgcagttaaatttgtcttatgccaaaaacgccacgtgtttacgtggcgttttgcttttatatctgtaatcttaatgccgcgctggcgatgttaggaaaattcctggaatttgctggcatgttatgcaatttgcatatcaaatggttaatttttgcacaggactggtgggtttggaacggactttcccttctgaataaaggtcttcgtggttatacttctgctaataattttctctgagagcatgcattgtgaatttactgacagtgagtactgatctcatcagtatttttttattcacgacactgtttctgttttttgcccgtaaggtggcaaaaaaagtcggtttagtggataaaccaaacttccgcaaacgtcaccagggattgatacctctcgttggggggattagcgtttacgcagggatttgcttcacgttcggaattgtcgattactatattccgcatgcatctctctatctcgcttgtgccggtgtgcttgttttcattggcgcgctggatgaccgttttgatatcagcgtaaaaatccgtgccaccatacaggccgctgttggcattgttatgatggtgttcggcaagctttatctcagtagcctgggttatatctttggctcctgggagatggtgctcggaccgtttggttacttcctgacgctatttgccgtctgggcggccattaatgcgttcaacatggttgatggcattgatggcttgctgggcgggttgtcctgcgtcagctttgcagcaatcggtatgattttgtggttcgacgggcaaaccagcctcgcaatctggtgctttgcgatgatcgccgccatcctgccatacatcatgcttaaccttggtatcctgggtcgccgctacaaagtctttatgggtgatgcgggcagtacgctgattggttttaccgttatctggatcctgctcgaaacgacccagggcaaaacccatcccatcagcccggttaccgctttgtggataatcgccattccgctaatggatatggtggcgattatgtaccgtcgcctgcgtaaaggcatgagcccattctctcctgaccgtcagcatattcaccatttgatcatgcgtgccgggtttacttcccgtcaggcgtttgtgctgattacccttgccgcagcactgctcgcttccattggcgtgctggcagaatattctcattttgtcccggagtgggtcatgctggtgctctttttgctagcattcttcctctatggatattgcattaagcgtgcctggaaagttgctcgctttattaagcgcgtaaaacgcagactgcgtagaaatcgtggtggcagccccaatttaaccaaataaatgaggatgtgatgacacaaccaatgcctgggaaaccggccgaagacgctgaaaatgaactggatattcgtgggttgtttcgtaccttgtgggctgggaagctatggattattggcatggggctggcgtttgcgttaatcgcgctggcgtatacgttttttgctcgtcaggagtggagcagcacggcgattaccgatcgtccaacggtgaatatgctggggggatattacagccagcagcaatttttgcgtaacctggatgtccgtagtaacatggcttctgccgaccaaccaagcgtcatggacgaagcctataaagagtttgttatgcaactggccagctgggatacccgcagagagttctggctgcaaaccgactattacaaacagcggatggtgggcaacagcaaagccgatgcggcgttgctggatgaaatgattaacaacatccagtttatccccggagactttacccgcgcggtcaatgacagcgtgaagcttattgccgaaaccgcgcctgacgctaataacctgttacgtcagtatgttgcttttgccagccagcgtgcagccagccatctgaatgatgagctgaaaggcgcatgggcggcgcgtaccatccagatgaaagctcaggtgaagcgtcaggaagaggtggcgaaagccatctacgaccgccggatgaacagcattgagcaggcgctgaaaattgctgagcagcataatattagccgcagtgcgacagatgtacctgccgaggaattacctgatagtgaaatgttcctgcttgggcgtccaatgcttcaggctcgactggaaaatttacaggccgtcggtccggcctttgatctcgactatgatcagaatcgggccatgttaaacaccctgaatgttggtccaaccctggatccgcgttttcagacctatcgctatttgcgtacgccggaagaaccggtaaaacgcgatagcccacgtcgtgccttcctgatgattatgtggggcattgtcggggggctgatcggggctggtgtcgcattaacccgccgttgcagcaaataacaacactgctgcggtgagcgcaaaggcgctcgccgcttattcgaagagaatcgatgtgaaagtactgactgtatttggtacgcgcccggaagccatcaagatggcgccgttggtgcatgcgttggcaaaagatcctttttttgaggctaaagtttgcgtcactgcgcagcatcgggagatgctcgatcaggtgctgaaactcttttccattgtacctgactacgatctcaacataatgcagccaggacagggcctgacagagataacctgtcggattctggaagggctaaaacctattcttgccgagttcaaaccagacgtcgtgctggttcacggcgatacgacgacgacgctggcaaccagcctggcggcgttttatcagcgtattcctgttggtcacgttgaggctggtctgcgcacgggcgatctctatagcccgtggccggaagaggctaaccgtacattgaccgggcatctggcgatgtatcacttctctccaaccgaaacttcccggcaaaacttgctgcgtgaaaacgttgcggatagccgaatcttcattaccggtaatacagtcattgatgcactgttatgggtgcgtgaccaggtgatgagcagcgacaagctgcgtagtgaactggcggcaaattacccgtttatcgaccccgataaaaagatgattctggtgaccggtcacaggcgtgagagtttcggtcgtggctttgaagaaatctgccacgcgctggcagacatcgccaccacgcaccaggacatccagattgtctatccggtgcatctcaacccgaacgtcagagaaccggtcaatcgcattctggggcatgtgaaaaatgtcattctgatcgatccccaggagtatttaccgtttgtctggctgatgaaccacgcctggctgattttgaccgacagtggcggcattcaggaagaagcgcctagcctggggaaacctgtgctggtgatgcgcgataccactgagcgtccggaagcggtgacggcgggtacggtgcgtctggtaggcacggataagcagcgaattgtcgaggaagtgacgcgtcttttaaaagacgaaaacgaatatcaagctatgagccgcgcccataacccgtatggtgatggtcaggcatgctctcgcattctggaagcgttaaaaaataatcggataagtctatgagttttgcgaccatttctgttatcggactgggttatatcgggctgccaacggcagcagcgtttgccagtcggcaaaaacaggtaattggtgtcgatatcaaccaacatgcggttgataccatcaatcgtggcgaaatccatatcgtcgaacctgatttggcgagtgtagtaaaaactgccgtagaaggcggttttttacgagcgagcacgacgccagttgaagcggatgcctggctgattgctgtacccacgccgtttaagggcgatcatgagccagatatgacctacgttgaaagcgctgctcgctccattgcgccagtgctgaaaaaaggcgcgctggtgatccttgaatccaccagcccggtggggagtaccgagaagatggcagaatggttagcagagatgcgtccggatctcactttcccgcagcaggtgggcgagcaggcggacgtcaacattgcttactgcccggaacgcgtgttaccaggacaggtaatggtcgagctgattaaaaacgatcgcgtgattggtggtatgacgccggtttgtagcgcccgcgccagcgaactgtacaaaattttcctcgaaggtgagtgtgtcgtcactaacagccggacggcggaaatgtgtaagctcaccgaaaacagcttccgcgatgtgaatatcgcttttgctaatgaattgagcctgatttgtgccgatcaggggattaacgtctgggaactgattcgcctggcgaatcgtcaccctcgcgttaatattcttcagcctggccctggcgtgggcggtcactgcattgctgttgatccgtggtttatcgtggcacagaacccccagcaggcgcggcttatccgtaccgcgcgcgaagtgaacgatcacaaaccgttctgggttatcgatcaggtgaaagcggcggtggctgattgcctggcggctaccgataaacgcgccagtgaactgaaaatcgcctgctttggtctggcgtttaaaccgaatattgatgacctgcgcgaaagcccggcgatggaaatcgctgaactgatcgcccagtggcatagcggcgaaactctggttgttgagcctaacatccaccagttgccgaaaaaactgaccgggctttgtactctggcgcagcttgacgaggcgctggcaacggcagacgtgctggtgatgctggtcgatcatagtcagttcaaagttatcaatggcgacaatgtccatcagcagtatgtcgtcgatgccaaaggagtctggcgctgatgagaaaaattctgataacaggtggtgccgggtttattggcagcgcgctggtgcgttatatcatcaacgaaacgagcgacgcggtggtagtggtcgataagctgacctacgccggaaacctgatgagcctggcaccggtcgcgcaaagcgagcgctttgcctttgagaaagttgatatctgcgatcgggcagaactggcacgcgtattcactgagcatcagccagactgtgtcatgcatctggcagccgaaagccatgttgaccgttctattgacggcccggcagcgtttattgaaaccaacattgtcgggacttatacattgcttgaagcggcgcgggcttactggaatgcgctgacggaagataaaaaaagtgcgttccgttttcatcatatctccactgacgaagtatatggtgacctgcacagcacggatgatttcttcaccgaaaccacgccgtatgcgccgagcagcccttattccgcgagtaaagccagcagcgaccatctggtgcgcgcctggctgcggacctatggtctgccgacgcttatcaccaactgcagcaataactacggcccttaccactttccggaaaaactgatcccgctgatgatcctcaacgcgctggcgggtaaaagcctgccggtatatggcaacgggcagcaaatccgtgactggctgtatgtggaagatcacgcccgcgcgctgtattgcgtggcgaccaccgggaaagtcggtgaaacctataatattggtggtcacaacgagcgtaagaatctcgatgttgtggaaaccatttgcgagctgctggaagaactggctccgaacaagccgcacggcgtggcgcactatcgtgacctgatcacctttgtcgctgaccgtccggggcatgatctgcgttatgccattgatgctagcaaaattgcccgtgaacttggctggctgccgcaggaaacctttgaaagtggaatgcgtaaaacggttcagtggtatctggctaatgaaagctggtggaagcaggtgcaggacggcagctatcagggcgagcgtttaggtctgaaaggctaattttcagcggaggcaaacatgaaaggtattatcctggcgggcggttccggcacccgattgcatccgattacgcgcggcgtaagcaagcaactgttgccgatttacgataagccaatgatttactatccgctgagcgtgctgatgctggccggtatccgcgaaattctcatcatcactacgccggaagataaaggttatttccagcgcctgctgggcgatggtagtgagttcggtatccagctggaatatgccgaacagcccagcccggacggtctggcgcaggcctttatcatcggtgaaaccttccttaatggtgaaccttcttgtctggtgctgggcgataacatcttcttcggtcagggcttcagtccgaagctgcgtcatgttgcggcgcgcaccgaaggggcgacggtttttggctatcaggtgatggacccggaacgctttggcgtggtggagtttgacgacaatttccgcgctatcagcctggaagaaaagccaaaacagccgaagagtaactgggcggtgaccgggctttatttctacgacagtaaagtcgtggagtacgcaaagcaggtgaagccgagcgagcgtggtgaactggagattacctccatcaaccagatgtacctcgaggcgggcaacctgaccgttgaactgctcgggcgcggatttgcctggctggataccggcactcacgacagcctgattgaagccagcacctttgtacagacggtggaaaaacgccagggctttaagattgcctgcctggaagagattgcctggcgtaacggctggctcgatgacgagggtgtgaagcgtgctgccagtagtttagcgaaaactggctacggccaatatctgctggagttacttcgtgcccgtccgcgccagtattgagccactaacctgggaaaacgccttctttggtgttaacagcgccatcgtgcgcattacgtctgaagcaccgctcctgacgccagacgcgttagcgccgtggtcacgggtgcaggccaaaattgcggcaagtaatacgggtgaactggatgccctgcaacagctgggattctccctggtagaaggtgaagttgatttggcgctacccgtgaacaatgccagtgatagcggtgctgtagtggcacaagagaccgatattcccgcattacgtcagttagccagcgccgcatttgcgcaaagccgttttcgtgcgccgtggtatgcgcctgacgccagcagtcgcttttatgcacagtggattgaaaatgccgtgcgcggcacctttgatcatcaatgtctgattttacgtgcggcgtccggcgatattcgcggctatgtctctttacgggaactcaatgcgacagatgcgcgaattggcctgctggctggacgcggtgcaggtgctgagctgatgcaaacggcgctaaactgggcgtatgctcgcggtaaaacaactttgcgggtggcgacccaaatgggcaacaccgccgcgcttaaacgatacatacaaagtggtgcgaatgtagaaagcaccgcgtactggttatacaggtgatcacatgattccatttaacgcaccgccggtggtgggaaccgaactcgactatatgcagagcgcaatgggtagcggcaaactgtgtggcgatggcggttttacccgtcgctgccagcagtggctggagcaacgttttggcagcgccaaagtgttactgacgccgtcctgcaccgctagcctggagatggcggcgctgctgctcgatatccagcctggcgatgaagtgatcatgccgagctacacctttgtctccaccgccaatgcctttgtgctgcgtggcgcaaaaatcgtttttgtggatgttcgcccggacaccatgaacatcgacgaaacgctgattgaagcggcgatcaccgacaaaacgcgcgttatcgtgccggtccattacgcgggtgtggcctgcgaaatggacaccattatggcgttggcgaaaaagcataatttgtttgtggtagaagatgccgctcagggcgtgatgtccacttacaaagggcgtgcactgggaaccattggtcatattggctgctttagcttccatgaaaccaaaaactacacggcgggcggtgaaggcggcgcgacgctgattaacgataaagcgttaatcgaacgagccgagatcatccgtgaaaagggcactaaccgcagccagttcttccgtggtcaggtcgataaatatacctggcgcgatattggctccagctatttgatgtccgatctgcaagctgcatacctgtgggcgcaactggaagcagcggatcgtatcaaccagcaacgtctggcgctgtggcaaaactactacgatgcgttagcgcctctggcgaaagccgggcgtatcgagctgccgagcattcccgatggctgcgtgcagaacgcgcatatgttctacattaaactgcgggatattgatgaccggagcgcgttgattaactttctgaaagaagcggaaatcatggcggtgtttcattacattccgctgcacggttgccctgcgggggaacactttggtgagttccacggtgaagatcgctacaccaccaaagagagcgagcgcctgctgcgcctgccgctgttctacaacctgagccccgtcaatcagcgtacggtaattgcgactttgttgaactacttttcctgatatgagcttggcaaaagcgtccttgtggacggcggccagtacactggtcaagattggtgccgggttactggtcggtaagttgctggcggtgagttttggtccggcggggcttgggctggcggcaaatttccgccagttgattaccgtgctcggcgtgcttgccggggctggcatctttaacggtgtaaccaaatacgttgcccagtaccatgataatccgcaacagctgcgccgcgtggtcggcactagtagtgcgatggtacttggtttctctacgctgatggcgctggtttttgtgctggcagctgcgccaatcagccagggattgtttggtaataccgactatcaggggctggtgcgtttagtggcgctggtgcaaatggggatcgcctggggcaacctgttactggcgctgatgaaaggctttcgcgatgccgcaggtaatgcgttaagcctgattgtcggcagcttgattggcgttctcgcgtactacgtcagttaccgtttgggcggttatgaaggggcgttgctgggtctggcgctgattcccgcgctggtggtaattcctgccgccatcatgttgatcaaacgtggtgtcatcccgttaagctatctgaaacccagctgggataacggtctggcagggcagttgagcaaatttacgctcatggcgttgattacgagcgtgaccttgcctgttgcttacatcatgatgcgtaaactgctggcggcgcagtatagctgggatgaggtggggatctggcaaggggtgagcagtatttccgatgcctacctgcaatttattacggcaagcttcagcgtatatttgctgcccacgttgagccggctaacggaaaagcgcgatatcacccgggaagtggttaaaagcctgaaattcgtcttaccggcagtggcggcggcgagttttaccgtctggctgctgcgtgattttgctatctggctgctgttgagcaataaatttaccgctatgcgcgatctctttgcctggcagttagtgggtgatgtgttaaaagtgggcgcttatgtctttggttatctggtgatcgccaaagcgagtctgcggttttatattctggcggaagtcagccagttcactttattgatggtatttgcccactggctaatccctgcgcatggtgcactgggcgcggcgcaggcatatatggcaacttatatcgtctatttttctctttgttgtggcgtgtttttactctggcgtaggcgggcatgactgtactgattcacgtactgggaagcgatatccctcaccataaccgaaccgttttgcggtttttcaatgacgcgctggccgcgacgagcgagcacgcgcgcgagtttatggttgttggcaaggacgacggcttaagtgatagctgtccggcgctttctgtgcaatttttccctgggaaaaaaagcctggcggaagcggtcatcgcgaaagcaaaagctaaccgtcagcagcgttttttcttccacggtcagttcaatcccacactgtggctggctctgctgagtggtggcattaagcccagccagtttttctggcatatctggggggcagacctgtatgagctttccagtggcttgagatataagcttttttacccactacgtcgcctggcgcaaaagcgagtcggctgtgtatttgccacccgcggcgatttgagcttttttgccaaaacgcacccaaaggtgcggggcgaactgctgttcttcccgacgcggatggaccctagcctcaatacgatggcgaacgatcggcaacgtgaagggaaaatgaccattctggtggggaactccggcgaccgcagcaatgagcatattgctgccttgcgcgccgttcatcagcaatttggcgatacggtaaaagtggtggtgccgatgggatatccgcctaataacgaagcgtacattgaggaagttcgtcaggcggggctggagttattcagcgaagaaaatctacaaattctgagcgaaaaactggaatttgacgcctatctggcgctacttcgtcagtgcgatcttggttactttatttttgcccgccagcagggcattggtacgctgtgcttactgattcaggcgggcattccttgtgtgcttaaccgggaaaatccgttctggcaggatatgacggaacaacatttgccggtgctgtttactaccgacgatctcaacgaggatattgtgcgtgaagcgcagcgccagttggcgagcgtggataaaaacaccattgccttctttagccctaactatctacaaggctggcagcgggcgttggcgattgccgccagggaggtcgcatgagtctgctgcaattcagtggcctgtttgttgtctggctgctctgcacgctgtttattgccacgctgacctggtttgagtttcgccgtgtgcgctttaacttcaatgtcttctttagtttgctgtttttgctcacctttttcttcggcttcccgctgaccagcgtgctggtatttcgctttgatgttggtgtcgcgccgccagaaatcttgttgcaggcgttgctttctgcgggctgcttctacgcggtttactatgtcacctacaaaacccgcctacgcaaacgcgttgctgatgtaccgcgccgtccgctgtttaccatgaaccgcgtggagaccaatcttacgtgggtgatcctgatgggtatcgcgctggtaagcgtcggcatcttcttcatgcacaacggctttttgctgttccggcttaactcctacagtcagatcttttccagtgaagtctccggcgtggcgttaaaacgcttcttttactttttcatcccggcgatgctggtggtctactttctgcgccaggacagcaaagcgtggctgtttttcctcgtcagcacggtcgcctttggcttgctgacttatatgattgtcggcggcactcgcgccaatatcatcatcgcattcgctatcttcctgtttattggcattattcgcggctggattagcttgtggatgctggcggcggcgggcgtgctggggattgttggcatgttctggctggcactaaaacgctatggaatgaatgtgagcggcgatgaagcgttctatacgtttctctatctcactcgcgacaccttcagcccgtgggagaatctggcgttgctgttgcagaactacgacaacatcgacttccagggcctggctccaattgtccgcgatttctatgtctttatcccttcctggctgtggccgggtcgcccgagtatggtgctgaacagtgccaactactttacctgggaagtgctgaataaccactccggactggcgatcagccctacgcttataggcagtctggtggtgatgggcggcgcgttgttcatcccgctcggggcgatcgtggttggtctgatcatcaaatggttcgactggctgtatgagctgggcaaccgcgagcctaatcgctataaagctgcgatattgcacagtttctgctttggggcgatcttcaatatgatcgtgctggcgcgtgaagggctggatagctttgtcagtcgcgtggtcttttttatcgtggtcttcggcgcatgtctgatgatcgcaaaactgttgtactggctttttgaaagcgccggactcattcataaacgtacaaaaagtagcctccggacgcaggttgaaggataacaatgaataacaacaccacggcaccaacctatacgctgcgtggcttacagttgattggttggcgtgatatgcagcacgccctcgattatctgtttgctgacgggcagcttaagcagggaacgctggttgccattaatgctgaaaaaatgctgactattgaagataacgccgaggtcagggagttaattaacgctgccgaatttaaatatgcggatggcatcagcgttgtacgtagtgtacgtaaaaagtacccgcaggcgcaggtttcccgcgttgccggtgccgatctctgggaagagctgatggcgcgcgcaggcaaagaagggacgccggtatttcttgtgggcggtaaacctgaagtgctggcgcaaactgaagctaaactgcgcaaccagtggaatgtgaatatcgttggcagtcaggatggttattttaaacccgagcagcgtcaggcgctgtttgaacgcattcatgccagcggtgcgcaaatcgtcaccgttgcgatgggaagcccaaagcaggagatcatcatgcgcgactgccgtctggtacatccagatgcgctgtatatgggcgttggcgggacttacgatgttttcaccggtcacgtaaaacgcgcaccgaaaatctggcaaacgctggggctggagtggctctaccgcctgcttagccagccgagccgcattaagcgtcagcttcgtttgctgcgttatttacgctggcactacaccggcaacctatgattttcctctctttgtaaagcgacggagtggtcactccgtcgcctgtctgcttttttattacacaaagcattcaaatttttaatgctttatttgccatttctcctgaattacgaaaacatttgcaacactcgatgtacccataacgataaccggtaacaccggaaagcatgcaaacacaacacgaggatttatggcagataacaaaccagagctacagcgtgggctggaagctcgacatatcgaactcatcgccctggggggcaccattggcgtcggcctgtttatgggggccgccagtaccctgaaatgggccgggccatccgtattgttggcctatatcatcgccgggctgttcgtctttttcatcatgcgtagtatgggcgaaatgttgttcctcgaaccggttaccggtagcttcgccgtttatgcgcatcgttatatgagcccgttctttggctatctcaccgcctggtcttactggtttatgtggatggcggtggggatctctgaaatcaccgccattggcgtttatgtccagttctggttcccggagatggcgcagtggatacccgcattgatcgcagtggcgctggtggcgttggcgaatctggcggcggtgcggttgtacggcgaaatcgagttctggttcgcgatgatcaaagtcaccacgattatcgtgatgattgtcattggcctgggcgtgattttctttggctttggcaatggcgggcagagcattggttttagcaatctcacagagcatggcggtttctttgcgggtggctggaaagggttcctgaccgctctgtgtattgtggtggcgtcctaccagggcgtggagctgattggcattactgccggtgaagcgaagaatccgcaggtgacgctgcgcagtgccgtaggcaaggtgctgtggcggatcctgattttctacgtaggcgcgattttcgttatcgtcaccatcttcccgtggaatgaaataggcagcaacggcagcccgttcgtactgacttttgccaaaatcggtattaccgcagcggcgggcattatcaactttgtggtgctgacggctgcgctctctggctgtaacagcggcatgtacagttgcggacgtatgctctacgcactggcgaaaaaccgtcagttaccggcggcaatggcgaaagtttcccgtcacggcgtaccggttgcgggtgtggcagtatctattgctattctgctaattggcagttgcctgaactacatcattcccaatccgcagcgtgtgtttgtctacgtctacagtgccagcgtgcttccggggatggtgccatggtttgtgatattgataagccagctgcgttttcggcgtgcacataaagcggcgattgccagccatccgttccgcagtatcctgttcccgtgggccaattacgtaacaatggcattcctgatttgcgttttgatcggcatgtactttaatgaagatacgcgtatgagcctgtttgttggcatcatctttatgctggcggtgacggcgatttataaagtttttggccttaatcgccacgggaaagcgcataaactggaggaataagcagcaaaacgcacaaaccgtaaccaaacgcgcaatttatttaaaaagggactagacagaggggtgggaagtccgtattatccacccccgcaacggcgctaagcgcccgtagctcagctggatagagcgctgccctccggaggcagaggtctcaggttcgaatcctgtcgggcgcgccatttagtcccggcgcttgagctgcggtggtagtaataccgcgtaacaagatttgtagtggtggctatagctcagttggtagagccctggattgtgattccagttgtcgtgggttcgaatcccattagccaccccattattagaagttgtgacaatgcgaaggtggcggaattggtagacgcgctagcttcaggtgttagtgtccttacggacgtgggggttcaagtcccccccctcgcaccacgactttaaagaattgaactaaaaattcaaaaagcagtatttcggcgagtagcgcagcttggtagcgcaactggtttgggaccagtgggtcggaggttcgaatcctctctcgccgaccaattttgaaccccgcttcggcggggttttttgttttctgtgcatttcgtcaccctcccttcgcaataaacgcccgtaataactcattgccccacggtatgatttcgcccttaacgtattgaaggatgacttcaggcaaggagcgaccatgctgcaacaggttccaacgcgtgcttttcatgtgatggcgaaaccgagcggttccgattgtaatctgaactgtgactactgtttttatctcgaaaaacaatccctttaccgcgaaaagccagtcacgcatatggacgatgacacgctggaagcgtatgtccgtcactatatcgctgccagcgaaccgcaaaacgaagtggcttttacctggcagggcggcgaaccaacgctactcgggctggcgttttaccgccgtgccgtagcgctacaggcgaaatatggtgctggcaggaagataagtaacagcttccagactaacggcgtgctgctggatgacgaatggtgcgcgtttctcgcggagcatcattttcttgttggtttaagcctggatggcccgcctgagatccacaatcaatatcgcgtgactaaaggtggcagacccacgcataagctggtgatgcgtgccctgacgctcctgcaaaaacatcatgtcgactataacgtgctggtctgcgttaatcgcaccagcgcgcagcaaccgttgcaggtatatgattttttgtgcgatgcgggagtcgaattcatccagtttattccggtggtcgagcgcctggctgatgaaacaactgcccgcgatggacttaagttacatgcgcctggtgatattcagggtgagctaacggaatggagcgtgcgccccgaggagttcggtgagtttctggtggcgatattcgaccactggatcaaacgcgacgtcggcaagattttcgtgatgaatatcgaatgggcgtttgccaattttgtcggtgcgccgggtgcggtttgccatcatcagccaacctgtgggcgcagcgtgattgttgagcacaacggcgacgtttacgcctgtgatcactatgtttatccgcaatatcggctggggaatatgcaccagcaaacaattgcagaaatgatcgattccccgcaacagcaggcgtttggtgaagataaatttaagcagttaccggcgcagtgtcgcagttgtaacgtgttaaaagcgtgctggggaggctgcccgaaacaccgcttcatgctcgatgccagcggcaaaccgggactgaattatttgtgtgccgggtatcagcgttatttccgccatctaccgccatatcttaaagcaatggctgatttgctggcgcacggtcgcccggccagcgacattatgcatgcgcatttgctggtggtgagtaagtaaaaatcggcggccgcctgcggttgattgccggatgcggcgtaaacgccttatccggcctacatgatcgtgcaaattcaataaattgcagcgttctgtaggctggataagatgcgtcagcatcgcatccggcaaaggcagatctcagcgatagcgccggcttagtcagatttaatctgcgcgcgtggtggatattttttcaggatctccatatacgcgtgcatttcggtctgtagcggtacacccatcggaatatggcgcacgccgatggagtcgctttcctgcggatcggtgtagaggttaaacacgctgcttcccgccgtttgcattactgtgccggtgaatccaccctgatatccgctctgggtataagcgtaaggttgctgaatcaggacgtgatacttgaactcatccatacgcacagcagcgagtttaccgttgaggaagtagtgctcggccttacggttagactgaccatttgttcccaggaagaaggatgtctggtccacaccatcgataaaggtggttttcggcactaaattcgccactttcgctccaggatgccctgccagatccagcgcggtagggaagagatctgccagatcgacaataccgtcagatttacgcggttggatcatccctttccagtaaacgaaagtcggtacgcgaacgccgccttcccaggtgctacctttcgcaccacggaacggggtgcgtccgtgcggcggtacttcggcttccggtccgttatcggaggtaaagacgatcagcgtgttatcaagctgaccgtttttctccagtgttttatacagattagcgaacacatcgttcatctccaccatgcagtcgccatagctggtgcgtgccggagagctacccgcatatttcgcatttgggtagttatcgaagtggcagccacgagtgccgtagtagaggaagaatggtttatcgctcttcgccatcttgtcgaggaacttaacgccatagtccatccagcgttgatccagatcttccatatatttcggcgtaatgtcggcaatggcctgttgttcgccgccgcgcaccgcatgaacgtcatctttgctgaacggtaattgcttgatgtattcagaacggtccggactcagggccacttccggattgacgtgaacgtcgcgccattcggtgtacatatcagacacgctgttaaagccacggaaatcatcaaagccaacgttctgcggctggctctctttgttttcccccatatgccattttccgatggcctgagtgacgtagccctgatcgtgcagcaactgcggcagcgtggttaacccttgcagcccgcccggttgcccgtacattggcggcatcagaatgccgtggtggatggagtattgtccggtgagaatggtggcgcgggttggggaagagcttggttgagaatacgcgctagttaaaatcagcccctggctggcaacggcgtcgatatctggtgtagggttacccaccgccacgccgccaccgttaaaaccgacgtccatccagcccacatcgtccagcaagaaaacaaccacattcggtttcttaccggtttttttctcaagttctgccagcttctgctgggtttctttatcctgcgccggatgctgcattactggcatcatattgtcggcaatagtggtcgccggtttaaccagatactggtttgggtgatcgtatccggcaaagcctttgcgtgcggtggcagtactcggggtatctgctgcgctggccatgagaggaagagcggcggcgacagcaacaacaagacgtttgggactaaagctaaattccatgcaaaatgctccggtttcatgtcatcaaaatgatgacgtaattaagcattgataattgagatccctctccctgacaggatgattacataaataatagtgacaaaaataaattatttatttatccagaaaatgaattggaaaatcaggagagcgttttcaatcctacctctggcgcagttgatatgtaaggcaggtttattatatcgcgttgattattgatgctgtttttagttttaacggcaattaatatatgtgttattaattgaatgaattttatcattcataataagtatgtgtaggatcaagctcaggttaaatattcactcaggaagttattactcaggaagcaaagaggattacagaattatctcataacaagtgttaagggatgttatttcccgattctctgtggcataataaacgagtagatgctcattccatctcttatgttcgccttagtgcctcataaactccggaatgacgcagagccgtttacggtgcttatcgtccactgacagatgtcgcttatgcctcatcagacaccatggacacaacgttgagtgaagcacccacttgttgtcatacagacctgttttaacgcctgctccgtaataagagcaggcgtttttttatgtatcaggaaggccccggaggtgcttgcctccgggtgagaaggaattactgtggcgggttattctgcaacgttaacatcaaaccgtcgcgacgcatagctgcagcttcttccggcttgtgcagtctgtccagcgcgtcggcaagccatgcgtaatcgtaggcgtccggacgttgtttcagcgctgcgcggaaggcgaggcttgcttcctgccattctccgtgcttcatcagactctggcccagtgtgctccacaacagcgggcgatcgccgacgtttttgatttgctggcgcagcactttttccagctgttccggattgtttgttttcagtcgaggaatcggcagcagtaggcgatcgtcgtactggcgtttcaggccatcgatgataatttgctgggcagtatcatgatcgtcacattcaataagatgttccgccattgccacctgcaacgctacctgatgacgcgttttccggctttggtttttccaccagttacgcaaaccttcgctaccgttatcggcacgcgcctgatccatcaggccaatccatgcctgttgttccagcattgcacgatgttcttcatcaccaacatgggctttcgccatacttgggataatatccagcaggctactccatgcacctgtgcggatatacgcctgttccgccagacgtaatacttccggatggcgtggcgtaacttccagcagcttatccacgccgtggcgtgcagcatggttttcattacgggccagttgcagacgtacgcgggtgatttctaccggaatggtgtcgttgccggccagctccgctgcgcgttccagatgttggttggcgcgtgcttcatcaccacgttgttgcgcggcttcggcagccagtagatagttcaccaccggttgttccgcgtgatcggcatttttcgccatcagcttttcaacttgctgataatcgccttccgccagtttcagcagcgcctgttcggtctgcttacgtgcacggcgacgcttacgtccgacaaaccacccacgggtgtgcgcgccagtgcggaagatccgccgcagtagccactcaatggcaaacagcactaccatcgccagaatcaatatgatcgccaggcccgtgacgctggtttcgatattgtagttgtcggtctggatcagcacataaccctgatggccggcaatcatcgggccaaccacgatccccgcaatcagcaacacaaagagcaataacacttttagcatggttattctccttgcggcgcggctgccggagtatcagcttgcggtgcaggtgcaggtttagcttccgttgtccccgctgccggttgtgccagcaggttacgcacgcgagtctgcatcagtttttccagcatcgcctggctttgcagggtttccggaagatccatgctgatattttgctggcttaactggtccacctcgtcgaggaacgctttggtggtggcatcatcagtatcgtagtaagcacgtacccaggtggagacgttctccagcgcctggcgataagtctcttcctggtgacgcggtacagcttgtgctgcgaccagcaggcgagagcgaatattttcgcgcagatagatatcctgatttggcgctaacagcggtacggcggtgtcatcacgacggcgaatcgtaatgaagttgtccataaagttctgccagcttttttgcagattgatacgccattcgctgatggaactggaaagctcttcaccgtcactatccatcgggctaccatcgctgtcattatcggccagacgcaggttatctacctgattactaagctgattaagcttaaggatgatgccgtcataatccacctggcttactgcagaaaggctggcgatatcatcggtaattgcccgacgaacggtaatcagactcgggtcattcatatccgccaggctggcgtctgcacttttcagcaacgctgcagcggtcgtgacgtcctgatcgctccacagcttccgtccggcgagtttcaccagaaaatcggcctgagccagcagccaggttttagcatcgctgccggaaatggtggcgaccttttgttggacttcatccaactgttttgccagcgtttcttgctgacgattcgcctgcttaagttgtgcagcttgttgcttaataatgccttccagctcggctttttggctctcctgggctttttgcaatgccgtcagttggttagccagggcatcgctggtggcggtctgattgacggcctgttgtttaccccagccatacaaaccgatgcccgccgccagagcaatagcgatagccaccgcgctgagaatcaatgcggtattgttcttactctttttttctgttgcgacaggttgactcgtggtgtccacggcctccctggtctcttcaaccacggcggaggttttttcttgttccgtcattatggcttcctgttatgagagttattgtaatgcccgtaaaagcgcatcgttgtcagcgttatcggcgaccttaatgtcttgccagcccagttcccgggcgagtttcgccaaacgctcactgacgaccaatagtcgacagtgtagtaaccagtgctcacgataccattgtgggatcaggctccagagttgctgcaacatttcaccgctggtaacaacgaccatcgtcacctcgcgggcttgccagcgcatcgcttcttctgcaccatcgtaatggattgcgcatcgttgataacattcacaaaaagtgacctcagcaccgcgcgccgtcagggtatccccaattagctcacgaccaccattgccacgtaatatcagcgcacgtttgcccgcaatattttgtaattcaggtaattgtagcaagacttcgctgatttcccgatcctgcgggtagagaatcttctgtccacttacggtatgtagtgccagtgcggtggtgcgtccaatggcgaaataatcaggtagtcggggccatttacgatcttgctgatgcagctgactttgggcaaaagcaaccgcgtgttggctgagggcaaacaacagatcgctctcccccagcgctgccagttgatcagcaagttgcggtaattgttgacccggagaaaactcaatcagcggaaaatgccaggccacctgccccagtgtgcgcagacggctcactaactcttctccagcgggagacgggcgggtgacaaggatactcatgccggggcgtctccgttatagacttcagcgaggatctcgcgcgcgccgttattcagtagctcttctgccaggctaatccccatttgttcggcatcttgcggcgcaccgcggcgttcaccgcgaataatctggctaccgtccggcgcgccgaccagcgcacgcagccagatttcgccatcaataagctcggcgtagctaccaattggcacctgacatccgccttcgagacgggtattcatggcgcgttctgcggtaacgcgcagtgcagtttcgtggtgattcagcgcggcaagcagctcgcgagtgcgactatcatcaaggcggcattcaatacccaccgcaccttgtcctaccgccggaagagaaatctcgggtggcaacgcggcgcgaatacgactctccagacctaaacgttttagtccggctacggcaagaatgatggcatcgtattcgccgttatccagtttgctcaggcgagtgccgacgttgccgcgcagggagcggataatcagatccggacggcgttcagccagttggcactggcgacgtaaactggacgtcccgacgatactgcctgccggtaacgcatccagactgtcatagttattggacacaaaggcatcgcgaggatcttcacgctcacaaatagtgaccagtcccagaccttgcgggaattcaaccggcacatctttcatactgtgtacggcgatatcggcgcgattttcgaggagcgcgacttccagctcttttacaaataagccttttccgcctactttcgccagcggcgtatcaagaatcacatcgccgcgcgtcaccatcggtaccagttcaacgaccaggcccggatggctcgccatcaacttgtctttgacatagtgtgcctgccagagtgcaagtgggctttggcgtgtggcaattcttaaaacattgtctaacatgcttgttaccgtcattatcatccgtggtccatcctaacatccttgccagagtgatgtcagtgttgtggtgaaacgtagacgcctgcgcaaaccgtaaaatgaggtctggcagtggatcctgacaggcgtttcacgccgttgtaataaggaatttacagagaataaacggtgctacacttgtatgtagcgcatctttctttacggtcaatcagcaaggtgttaaattgatcacgttttagaccattttttcgtcgtgaaactaaaaaaaccaggcgcgaaaagtggtaacggttacctttgacatacgaaatatcccgaatgccgcgtgttaccgttgatgttggcggaatcacagtcatgacgggtagcaaatcaggcgatacgtcttgtacctctatattgagactctgaaacagagactggatgccataaatcaattgcgtgtggatcgcgcgcttgctgctatggggcctgcattccaacaggtctacagtctactgccgacattgttgcactatcaccatccgctaatgccgggttaccttgatggtaacgttcccaaaggcatttgcctttacacgcctgatgaaactcaacgccactacctgaacgagcttgaactgtatcgtggaatgagtgtacaggatccgccgaaaggtgagcttccaattactggtgtatacaccatgggcagcaccagctccgtagggcaaagttgttcctctgacctggatatctgggtctgtcatcaatcctggctcgatagcgaagagcgccaattgctacaacgtaaatgtagcctgctggaaaactgggccgccagcctgggtgtggaagtcagcttcttcctgattgatgaaaaccgcttccgtcataatgaaagcggcagcctggggggcgaagattgtggctccacccagcatatactgctgcttgacgaattttatcgtaccgccgtgcgtctcgccggtaagcgtattctgtggaatatggtgccgtgcgacgaagaagagcattacgacgactatgtgatgacgctttacgcgcagggcgtgctgacgccaaatgaatggctggatctcggtggcttaagcagcctttctgctgaagagtactttggtgccagcctttggcagctctacaagagtatcgattccccatacaaagcggtactgaaaacactgctgctggaagcctattcctgggaatacccgaacccacgtctgctggcgaaagatatcaaacagcgtttgcacgacggcgagattgtaagctttggtctcgatccatactgcatgatgctggagcgtgttactgaatacctgacggcgattgaagattttacccgtctggatttagtacgtcgctgcttctatttaaaagtgtgcgaaaagctcagccgtgaacgcgcctgcgtaggctggcgtcgcgcagtgttgagccagttagtgagcgagtggggttgggacgaagctcgtctggcaatgctcgataaccgcgctaactggaagattgatcaggtgcgtgaggcgcacaacgagttgctcgacgcgatgatgcagagctaccgtaatctgatccgctttgcgcgtcgcaataaccttagcgtctccgccagtccgcaggatatcggcgtgctgacgcgtaagctgtatgccgcgtttgaagcattaccaggtaaagtgacgctggtaaacccgcagattagtcccgatctcagcgaaccgaatctgacctttatttatgtgccgccgggccgggctaaccgtagtggttggtatctgtataaccgcgcgccaaatattgagagcatcatcagccatcagccgctggaatataaccgttacctgaataaactggtggcgtgggcatggtttaacggcctgctgaccagccgcacccgtttgtatattaaaggtaacggcattgtcgatttgcctaagttgcaggagatggtcgccgacgtgagccaccatttcccgctgcgcttacctgcaccgacaccgaaggcgctctacagcccgtgtgagatccgccatctggcgattatcgttaacctggaatatgacccgacagcggcgttccgcaatcaggtggtgcatttcgatttccgtaagctggatgtcttcagctttggcgagaatcaaaattgcctggtaggtagcgttgacctgctgtaccgcaacagctggaacgaagtgcgtacgctgcacttcaacggcgagcaaagcatgatcgaagccctgaaaactattctcggcaaaatgcatcaggacgccgcaccgccagatagcgtggaagtcttctgttatagccagcatctgcgcggcttaattcgtactcgcgtgcagcaactggtttctgagtgtattgaattgcgtctttccagcacccgccaggaaaccgggcgtttcaaggcgctgcgcgtttctggtcaaacctgggggttgttcttcgaacgcctgaatgtaagcgtacagaaactggaaaacgccatcgagttttatggcgcgattagccataacaaactgcacggcctgagtgtgcaggttgaaaccaatcacgtcaaattaccggcggtggtggacggctttgccagcgaagggatcatccagttctttttcgaagaaacgcaagacgagaatggctttaatatctacattctcgacgaaagcaaccgggttgaggtatatcaccactgcgaaggcagcaaagaggagctggtacgtgacgtcagtcgcttctacagcagtagccatgaccgttttacctacggcagtagcttcatcaacttcaacctgccgcagttctatcagattgtgaaggttgatggtcgtgaacaggtgattccgttccgcacaaaatctatcggtaacatgccgcctgccaatcaggatcacgatacgccgctattacagcaatattttagctgatgaacgtgccggaaagcgaggcttatccggcatgcaatcttagcggaaactgactgtttcacccgcctgctgcgtcgccgcctgttccagcaaatcccagaaggtttcgccgctgcgatcacaaatccactcatcgcctttcaggtcaaaatggtagccgccctgtttggttgccagccatacctggtgcagcggctcctggcggttgataatgattttgctgccattctcaaaggtaatggtcagtacgccgccgttgatttcgcagtcgatatcgctgtcgccatcccagtcgtccaggcgttcttcaatggtcagccagagttgatcagccaggcgatgaaattcactgtcgttcattgttgtatcctgtttttaagtgatggcggcagtatagcggcatggggtcagggcttcaaagtttgcacctctgcggctgcgttccggcacgatagttccgtcaccggaataatgatgtctctgtgtagcgaaagatttgtctctagtttagggcgcagttacaccacgtctttccctgtttctggtaaacattatgatcaggtttaccgagcgagcatcctcacgctgacggaactaaaaaagacaacaaacaaaccacattgcgatagtgcataaagccatcctggcgcgaggtgccgatcacgaaactaccagcaaaacataaatccccacgagtaagcgttatactcgcagcatttcctcacttttcagacttcataaagagtcgctaaacgcttgcttttacgtcttctcctgcgatgatagaaagcagaaagcgatgaactttacaggcaatccataatgaaaaacgtgtttaaggcactcactgtattacttactctcttcagcctgacgggctgcggtctgaaaggtccgctctatttcccgcctgcagataaaaacgcaccgccgccgaccaaaccggtagagacgcaaacgcaatccacggtgccggataaaaacgatcgcgccactggcgatggtccatcccaggtgaattactaaaagtcagtttctgtacccgcgtgattggagtaaatgatgcagttcagcaaaatgcatggccttggcaacgattttatggtcgtcgacgcggtaacgcagaatgtcttttttagtccggagctgattcgtcgcctggctgatcggcacctgggggtagggtttgaccaactgctggtggttgagccgccgtatgatcctgaactggattttcactatcgcattttcaatgctgatggcagtgaagtggcgcagtgcggcaacggtgcgcgctgctttgcccgttttgtgcgtctgaaaggactgaccaataagcgtgatatccgcgtcagcaccgccaacgggcggatggttctgaccgtcaccgatgatgatctggtccgcgtaaatatgggcgaacccaacttcgaaccttccgccgtgccgtttcgcgctaacaaagcggaaaagacctatattatgcgcgccgccgagcagacaatcttatgcggcgtggtgagcatgggaaatccgcattgcgtgattcaggtcgatgatgtcgataccgcggcggtagaaacgcttggtcctgttctggaaagccacgagcgttttccggagcgcgccaatatcggttttatgcaagtggttaagcgcgagcatattcgtttacgcgtttatgagcgtggggcaggagaaacccaggcctgcggcagcggcgcgtgtgcggcggttgcagtagggattcagcaaggtttgctggccgaagaagtacgcgtggaactccccggcggtcgtcttgatatcgcctggaaaggtccgggtcacccgttatatatgactggcccggcggtacatgtctacgacggatttattcatctatgaagcaaccaggggaagaactgcaggaaacactcacggagcttgatgaccgggcggttgtcgattatctgattaaaaatcctgagttttttatccgtaatgcgcgcgcagtagaagcgatacgtgtgccgcatccggtacgcggcaccgttagcttggtcgagtggcacatggcccgcgcacgtaatcatattcatgttctggaagagaacatggcgctgttgatggaacaggctatcgccaacgaaggcctgttttatcgcctactctacctgcagcgcagtctcaccgccgccagcagtctcgacgatatgctgatgcgctttcaccgctgggcgcgcgatctcggcctggcaggtgcgagtctgcgcctgtttccggatcgctggcgcttaggtgcgccgagcaaccacactcatctggcattaagccgtcagtctttcgaaccgctgcgtattcagcgtttggggcaggaacagcactatcttgggccgcttaacggaccagagctgctggtggtgctaccggaagcgaaagcggtgggaagcgtggcgatgagcatgctgggaagcgatgctgatttgggtgtcgtgctgtttaccagtcgcgatgccagtcactatcaacaagggcaaggaacgcagttacttcatgaaattgcgctgatgttgccggagcttctggagcgttggattgaacgcgtatgaccgatttacacaccgatgtagaacgctacctacgttatctgagcgtggagcgccagcttagcccgataaccctgcttaactaccagcgtcagcttgaggcgatcatcaattttgccagcgaaaacggcctgcaaagctggcagcaatgtgatgtgacgatggtgcgcaattttgctgtacgcagtcgccgtaaagggctgggagcagcaagtctggcgttacggctttctgcgctacgtagcttttttgactggctggtcagccagaacgaactcaaagctaacccggcgaaaggtgttagcgcaccgaaagcgccgcgtcatctgccgaaaaacatcgacgtcgacgatatgaatcggctgctggatattgatatcaatgatcccctcgctgtacgcgaccgtgcaatgctggaagtgatgtacggcgcgggtctgcgtctttctgagctggtggggctggatattaaacacctcgacctggagtctggtgaagtgtgggttatggggaaaggcagcaaagagcgccgcctgccgattggtcgcaacgctgtggcgtggattgagcactggcttgatttgcgcgacctgtttggtagcgaagacgacgcgctttttctgagcaaactgggcaagcgtatctccgcgcgtaatgtgcagaaacgctttgccgaatggggcataaaacaagggctgaataatcacgttcatccgcataaattacgtcacagcttcgccacgcatatgctggagagcagcggcgatcttcgtggtgtgcaggagctgctgggtcatgccaacctctccaccacgcaaatctatactcatcttgattttcaacaccttgccagcgtgtacgatgcggcgcatccacgcgccaaacgggggaaataatgcgtttttaccggcctttggggcgcatcagcgcgctcacctttgacctggatgataccctttacgataaccgtccggtgattttgcgcaccgagcgagaggcgcttacctttgtgcaaaattatcatccggcgctgcgcagcttccagaatgaagatctgcaacgcctgcgccaggcggtacgggaagcggaacccgagatttatcacgacgtgacgcgctggcgttttcgtagcattgaacaagcgatgctcgacgccgggctgagtgccgaagaagccagtgcaggcgcacacgcagcaatgatcaactttgccaaatggcgcagccgaatcgacgtcccgcagcaaactcacgacaccttaaaacagctggcgaagaaatggccgctggtggcgatcaccaacggtaacgcccagccggagctgtttggtttgggggattattttgagtttgtgctgcgcgctggcccgcacgggcgcagtaaaccgttcagcgatatgtactttttggctgcggaaaaactcaacgtgccgatcggcgagatcttacatgttggggacgatctcaccactgacgtgggtggggcaattcgcagcggaatgcaggcttgttggatcagaccggaaaatggcgatctgatgcaaacctgggacagccgtttactgccgcatctggaaatttcccggttggcatctctgaccagcctgatataatcagcaaatctgtatatatacccagctttttggcggagggcgttgcgcttctccgcccaacctatttttacgcggcggtgccaatggacgtttcttacctgctcgacagccttaatgacaaacagcgcgaagcggtggccgcgccacgcagcaaccttctggtgctggcgggcgcgggcagtggtaagacgcgcgtactggtgcatcgtatcgcctggttgatgagcgtggaaaactgcagcccatacagcattatggcggtgacgtttaccaacaaagcggcggcggagatgcgtcatcgtatcgggcaactgatgggcacgagccagggcggtatgtgggtcggcaccttccacgggctggcgcaccgtttgctgcgtgcgcaccatatggacgccaatctgccgcaggatttccagatcctcgacagtgaagaccagctacgcctgcttaagcgtctgatcaaagccatgaacctcgacgagaagcagtggccgccgcggcaggcaatgtggtacatcaacagccagaaagatgaaggcctgcgtccgcatcatattcaaagctacggtaatccggtggagcagacctggcagaaggtgtatcaggcgtatcaggaagcgtgtgaccgcgcgggcctggtggacttcgccgagctgctgctgcgcgctcacgagttgtggcttaacaagccgcatatcctgcaacactaccgcgaacgttttaccaatatcctggtggacgaattccaggataccaacaacattcagtacgcgtggatccgcctgctggcgggcgacaccggcaaagtgatgatcgtcggtgatgacgaccagagtatctacggctggcgcggggcgcaggtggagaatattcagcgtttccttaatgatttccccggtgccgaaactattcgtctggagcaaaactaccgctctaccagcaatattctgagcgccgctaacgccctgattgaaaacaataacgggcgtctgggtaaaaaactgtggaccgatggcgcggacggtgagcctatttccctctattgcgcttttaacgaactcgatgaagcgcgttttgtggttaaccgcatcaaaacctggcaggacaacggcggagcgcttgccgagtgcgccattctctaccgcagcaacgcccagagccgggtgctcgaagaggcgttattgcaggccagtatgccgtaccgtatttacggcgggatgcgcttcttcgaacgccaggaaatcaaagatgcgctcagctatctgcgcctgattgccaaccgcaacgacgacgcggcctttgagcgtgtggtgaatacgccaacgcggggtattggtgaccggacgctggacgtggtacgtcagacaagccgcgatcgccagttaacactctggcaggcatgtcgtgagctgttgcaggaaaaagccctcgccgggcgagctgccagcgccttgcagcgatttatggaattaatcgacgccttagcgcaggaaactgccgatatgccgctgcatgtacagactgaccgggtaattaaagactccggcctgcgtaccatgtatgagcaggagaagggcgaaaaaggtcagacgcgtatcgaaaacttagaggaactggtgacggcaacgcgccagttcagctacaacgaagaagacgaagatttaatgccgctgcaggcgttcctctcccatgcggcactggaagcaggtgaagggcaggcggatacctggcaggatgcggtgcagttgatgacgctacacagcgcgaaaggcctggagttcccgcaggtgtttatcgttggtatggaagagggcatgttcccaagccagatgagcctggatgaaggcgggcgtctggaagaagaacgccgtctggcctacgttggcgtaacccgcgcgatgcagaaactgacgctgacctacgcggaaacccgccgtctgtatggtaaagaggtttaccatcgcccgagccgctttatcggcgagctgccggaagagtgtgtggaagaggtgcgcctgcgcgccacggtaagccgcccggtcagccatcagcggatgggtacgccgatggtcgagaacgacagcggctacaagctcggccagcgcgtacgccacgctaagtttggtgaaggcaccattgtcaatatggaaggcagcggtgagcatagccgtttgcaggtggcatttcagggccagggtattaaatggctggtggcggcatacgcccggctggagagcgtgtaacgttgccggatgcggtgctgcgcaccttatttggcctaaaaaatcattcagattcaataaattgcaacgtcatgtaggccggatagggcgtttacgccgcatccggcatctgcgccatcttcagtatctgacacaaaactatcgttttaacctttccgctcgacggaaatcatggtgacaaaaggatagcgttgccacgggattgccccgcctttcatatacatatgactaatcgtgccatcaagataaagcagctgctcaacgttcagtttcgctttggcataacaggcaaaatcataaaaatttgttgcctgctggctcaacaaaaacacggcgttcccatgtttattaatcccaacaccgttacgaattttgctactggcgacgttgggatgaatacgcggattaattacaccgttttccatcaacattggcccactctgcaccgcaaactgaatctctttactggttttgaaggcatccagacgaacgatgccgactttatctcccgcgacataaaacacgccgccaggacggataaagaaattcccttcaccactagcgagatttaacgccaccttctgctgaccgttttcgatgtacaaaccgagcggcgcatagctttcatcatagatgccgccgttcatcgccatctgcacctgaccctgactattaatatccgccagcagagcatgtaacgttccccacgcttcgccattggctttttgccagtacattttcacccgctctgtttgaggattaacggtatacgcctgtacggtcagcgtcggatcactgagtgcgcaatcatcagcggcaacagcaaacaagggaagtaaggtgagggcgagaaaaatccgtttgagattcaaggtgatcattcctttaccaatgagtagctgatgcgccattataggtcctggatgtgggatttttttatcctgttagcgaccttgacgagtaccaaaaagcgcgaagttcaactattgttctgtggtgttctgttgcgtgttgacggcaaaattttgctggcgtaacatgcgcgcacgatcactctaagaggacattcgccttggacacacccagtagatactggctcactatcctgtcatccaggatcaactcctaaggctatccctttttgctgatagccttagcggttgtcagcgacctcaatttttcccgtcgcgctgagtcaggctgtttaatggtctgaaacccaatttgtttctgtgtgcccaccgaactgtccgatattttaagcattgggagtcccggtcatgctgagcgcatttcaactggaaaataaccgactgacccggctggaagtcgaagagagtcaaccccttgtaaatgcagtatggattgatcttgtcgaaccggacgacgacgagcgactgcgcgtacaatctgaacttggccagagcctggcaacccgcccggaactggaagacatcgaagcaagcgcacgtttctttgaagacgacgacggcctgcatattcactccttcttcttctttgaagatgcggaagatcacgccggtaactccactgtggcatttaccatccgtgatggtcgtctgtttactctgcgtgagcgtgaactgcccgcttttcgtctgtatcgtatgcgtgcccgtagccagagcatggtagacggtaacgcctacgagttgctgctggatctgttcgaaaccaaaatcgaacagttggcagatgaaattgaaaatatctatagcgacctggagcagttgagccgggtgattatggaagggcatcagggcgatgagtacgacgaggcgctctccactctggcggaactggaagatatcggctggaaagttcgcctgtgtctgatggatacccagcgcgcgctcaacttcctggtgcgtaaagcgcgtttaccgggtgggcaactggagcaggcgcgtgaaatcctgcgagatatcgaatccctgctgccgcataacgaatccctgttccagaaggtgaacttcctgatgcaggcggcaatgggttttatcaacatcgagcagaaccgcatcatcaaaatcttcagcgtggtatccgtggtattcctgccgccgacgctcgttgcttccagctatggcatgaactttgagtttatgccagaactgaagtggagcttcggctaccctggcgcgattatctttatgatcctcgcgggcctggcaccgtatctgtactttaagcggaagaactggttgtaaaaaacgagagcggtggcttagtctggctaagccacctgttattcaaaggctccaggtatttaacccttttacctctttctcatagaaccatttgttcgtgttaacagcaacataggctgctacggcaattcccagaatgttaacgccaattagtgcaccaacaaatagagatagaataccaagtaatagaactataattgcttttttccataaccccaggacaaataaatatatccaggaacagaagaaagcaatgaaattcatttgaatagttaagcgttgtcttacttttaatgctttaaatgctgctttatattctggtgttgccccccagaatccaggaaaaccatgttgatcataaaaattaaatcggtatttccatttttcacttaaactaccatcgttcatatattccttactcataaatactccataattattgtttactactatcagtaggtgcaagcattagcatactgaaagtggaaaaataacaaatcaaaaaaatcatgctaccattgccactacaggcaaaatcttcggctatcattgtgatgatagagatgatatatactgctaatgtaccaaaaacataagtttttatatagatgaaaccactatcacggagtcgctggcaattcatgttgatgacgagataatggagtacgatggtagagactataacaagaaagcctgcttctccatcgttaaaaaagataataagaaaggcaaaaatgaaatttattaaaataaaactaaatatataacgacgtctggaaatcttaccgttagatgttgggataaatatacgtaacataaattttacatccttgtatgagtctccggtcagcatggcaatatgcccactctcatgcaagagtcggcatattttttcagaatatatttattttttatttggacgttctacgctgcgtataaatcgcatccatcacaaaaattgccagcgccacccaaataaaggcgaaagtcaccatcttatcggcacccggtttttcaccataaaacgtcacagccagcaggaacatcagcgtcgggccaatgtactggaaaaagcctaacgtactgagacgcaagcgcgtggcagcggcggtaaaacacaacagcggtacggtagtgacaataccggcggcgatcagcagtaaattcaggctcatcgggttttgccccatatggctggtactgctgtcggcaatagcaaacaggtaaattgccgccacgggcagcagccacatggtttcgattaacatgccggtttgcgcttcaacggcaatcttcttgcgtaccagaccgtagaaggcaaaactaaatgccagtcccagcgcgataataggtaggctaccaaaagtccacagctggactaacacgccacatatcgccagaatcaccgccagccattgcatccggcggaatcgctcgccgaggaaaatcatccccagcacaatgttcaccagcgggttaataaagtaaccaaggctcgcttccagcatatggtgattgttcaccgcccagataaacagtagccagttgccaccaatcagcacggcagagactgccagcataaaaattttctgtggcgtctgaatcagcgtttttaaataggaccactggcggcaaatgctcatcagcaccaccataaagaaaaagctccagatcacgcgatgcgtcaggatttcatcggcgggcacgtagtaaatcaacttgaagtacgctggcgctataccccaaataaaataagcggcaagagcgagtaatacgccctgccgcgtttgttttgcatccatcgggaatactcatttttaattggtaacagcagtttacctgcttttatgtcttcaacctaccatataggtggcggtggcactggcaatataaagctgttcttcattgtgtaattcaacgcgggcgacggcgactttattgcctgcacgcaacaggctactagtagcagtaaaacgctcgcccctgcctgggcgcagataatcaacgcgaagatcaatggtccccatccggcttagccgctggcgtagttcatcttcactgatggtttcgtggcgggttaaggtacttcccacgcacaccagaccggcggcgacatccagcgcgctcgcaatgaccccgccgtgcaaaatgctttgcgcccagttgcccaccatcattggctgatttttaaaggccagctgtgcgaactctttttcgtaacgctccagttccatccccaatgcgcggttaaatggcatgtgataaacaaacatctcacccactaatttcagggcttgttcagcggtcagtacggcagacatatcatccttacacttcattggttaatgaaatgttgattttatgcttctttgttgttggtttctactttaggaagggataactaacggctatggagttaagtatgtaaaatagcccgcagaaaaatattcaccttatcaataattcgttacggagaacacgaccgatgcggactctgcagggctggttgttgccggtgtttatgttgcctatggcagtatatgcacaagaggcaacggtgaaagaggtgcatgacgcgccagcggtgcgtggcagtattatcgccaatatgctgcaggagcatgacaatccgttcacgctctatccttatgacaccaactacctcatttacacccaaaccagcgatctgaataaagaagcgattgccagttacgactgggcggaaaatgcgcgtaaggatgaagtaaagtttcagttgagcctggcatttccgctgtggcgtgggattttaggcccgaacagcgtgttgggtgcgtcttatacgcaaaaatcctggtggcaactgtccaatagcgaagagtctagtccgtttcgtgaaaccaactacgaaccgcaattgttcctcggttttgccaccgattaccgttttgcaggttggacgctgcgcgatgtggagatggggtataaccacgactctaacgggcgttccgacccgacctcccgcagctggaaccgcctttatactcgcctgatggcagaaaacggtaactggctggtagaagtgaagccgtggtatgtggtgggtaatactgacgataacccggatatcaccaaatatatgggttactaccagcttaaaatcggctatcacctcggtgatgcggtgctcagtgcgaaaggacagtacaactggaacaccggctacggcggcgcggagttaggcttaagttacccgatcaccaaacatgtgcgcctttatactcaggtttacagcggctatggcgaaagcctcatcgactataacttcaaccagacccgtgtcggtgtgggggttatgctaaacgatttgttttgatgaacggttgagtggttggcaaatctggaatccagcatccaggattaccctctcagagactaaaagcattgcagtttctcgcgcaggcgctgaaaatagcgcctgtttttatttcaggcaatcggggtgaatgtggcgcaggcggaagtgttgaatctggagtccggagctaaacaggttttacaagaaacctttggctaccaacagtttcgccccggccaggaagaaattatcgacactgtgctttccggccgcgattgcctcgtcgtcatgcccactggtggcggaaaatccctttgctatcaaatccctgccttattgctaaacggccttaccgtggttgttagtccgctgattagcttgatgaaagatcaggtggatcaactgcaagccaacggcgtggcggcggcgtgccttaacagcacgcaaacccgcgaacagcaacttgaagtgatgacaggctgccgcaccgggcaaattcgtctgctttatatcgccccggaacgcctgatgctggataactttcttgagcatctggcgcactggaatccggtgttattagccgttgatgaagcgcactgtatctcccaatggggccacgatttccgcccggaatatgccgcgctcggtcagttgcgccagcggttcccgacgctgccgtttatggcgctgaccgccacagccgacgacaccacgcgccaggatatcgtgcgcctgctggggctgaacgatccgctgattcaaatcagcagttttgaccgtccgaatattcgctacatgctgatggagaagttcaaaccgctcgatcagttgatgcgctacgtgcaggaacagcgcggtaagagtggcattatctactgcaacagccgcgcgaaagtagaagacaccgctgcgcgcctgcaaagcaagggaattagcgcggcggcctatcatgccgggctggaaaataatgttcgcgccgatgtgcaggaaaaattccagcgcgatgacctgcaaattgtggtggcgacggtggcgttcggcatgggcatcaataaaccaaacgttcgcttcgtggtccactttgatattccgcgcaatatcgaatcctattatcaggaaaccggacgcgccgggcgtgatggcctgcccgcggaagcgatgctgttttacgatccggctgatatggcgtggctgcgccgttgtctggaagagaagccgcaggggcagttgcaggatatcgagcgccacaaactcaatgcgatgggcgcgtttgccgaagcgcaaacttgccgtcgtctggtattgctgaactattttggcgaagggcgtcaggagccgtgcgggaactgcgatatctgcctcgatccgccgaaacagtacgacggtagtaccgatgctcagattgccctttccaccattggtcgtgtgaatcagcggtttgggatgggttatgtggtggaagtgattcgtggtgctaataaccagcgtatccgcgactatggtcatgacaaactgaaagtctatggcatgggccgtgataaaagccatgaacattgggtgagcgtgatccgccagctgattcacctcggcctggtgacgcaaaatattgcccagcattctgccctacaactgacagaggccgcgcgcccggtgctgcgcggcgaatcctctttgcaacttgccgtgccgcgtatcgtggcgctcaaaccgaaagcgatgcagaaaagcttcggcggcaactatgatcgcaaactgttcgccaaattacgcaaactgcgtaaaagcatagccgatgaaagtaatgtcccgccgtacgtggtgtttaacgacgcaaccttgattgagatggctgaacagatgccgatcaccgccagcgaaatgctcagcgttaacggcgttgggatgcgcaagctggaacgctttggcaaaccgtttatggcgctgattcgtgcgcatgttgatggcgatgacgaagagtaatcagcagcataaaaaagtgccagtatgaagactccgtaaacgtttcccccgcgagtcaaatgtatgttgatgttatttctcaccgtcgccatggtgcacattgtggcgcttatgagccccggtcccgatttcttttttgtctctcagaccgctgtcagtcgttcccgtaaagaagcgatgatgggcgtgctgggcattacctgcggcgtaatggtttgggctgggattgcgctgcttggcctgcatttgattatcgaaaaaatggcctggctgcatacgctgattatggtgggcggtggcctgtatctctgctggatgggttaccagatgctacgtggtgcactgaaaaaagaggcggtttctgcacctgcgccacaggtcgagctggcgaaaagtgggcgcagtttcctgaaaggtttactgaccaatctcgctaatccgaaagcgattatctactttggcagcgtgttcagtttgtttgtcggtgataacgttggcactaccgcgcgctggggcatttttgcgctgatcattgtcgaaacgctggcgtggtttaccgtcgttgccagcctgtttgccctgccgcaaatgcgccgtggttatcaacgtctggcgaagtggattgatggttttgccggggcgttatttgccggatttggcattcatttgattattagccggtgatgccagacgcgtcttcagagtaagtcggataaggcgtttacgccgcatccgacattatttttcacgcatgcctcgcgcttgctaacagcgctcccaccagcataaacaagctgccgaaaatcttattcagcgccttcatctgctttggtcctttaatccatagagcaatccgttgagcaagggtggcgtaaccgatcatcacaataatatcgaccacaatagtggtgacgccgagcacgatatactgcatcagttgcggctgttgcggcatgatgaattgcggaaatagcgccgccagaaacacaatacttttgggattggtgagattcacaaaaactgcgcgctggaacaaatgtcgacggctttgagtagaggccaggcttttaaggtcaattgcaccagcggcgcgccactgctggattcccagccaaatcaagtaagccgcgcctgcccacttcaacacttcaaacgcaatcacactgcgggaaaatagcgtccccaaccccacgccaaccagcacaatatgaatcgccagtccggtctgaagcccagcaatagacgccaccgcgccgcgataaccgtggttgaggctggtggtcatagtgttgattgcaccagagcctgggctcaggcttaaaatgatgcttgtcagcaggtaggcaaaccaccattctaaggtcatgatgaactcccggtgtgtctatttttgtgccacaatacgctactgtcgcagcgttgtgtcaggcacgctaaaaaaaacgattttacgtggtttaagaggcagattacccgatgtttcagcagcaaaaagactgggaaacaagagaaaacgcgtttgctgcttttaccatgggaccgctgactgatttctggcgtcagcgtgatgaagcagagtttactggtgtggatgacattccggtgcgctttgtccgttttcgcgcacagcaccatgaccgggtggtagtcatctgcccggggcgtattgagagctacgtaaaatatgcggaactggcctatgacctgttccatttggggtttgatgtcttaatcatcgaccatcgcgggcagggacgttccggtcgcctgttagccgatccgcatctcgggcatgttaatcgctttaatgattatgttgatgatctggcggcattctggcagcaggaggttcagcccggtccgtggcgtaaacgctatatactggcacatagcatgggcggtgcgatctccacattatttctgcaacgccatccaggtgtatgtgacgccattgcgctaactgcgccaatgtttgggatcgtgattcgtatgccgagttttatggcacggcagatcctcaactgggccgaagcgcatccacgtttccgtgatggctatgcaataggcaccgggcgctggcgcgcgttgccgtttgctatcaacgtactgacccacagcagacagcgatatcgacgtaacttacgcttctatgctgatgacccaacgattcgcgtcggtgggccgacctaccattgggtacgcgaaagtattctggctggcgaacaggtgttagccggtgcgggtgatgacgccacgccaacgcttctcttgcaggctgaagaggaacgcgtggtggataaccgcatgcatgaccgtttttgtgaactccgcaccgccgcgggccatcctgtcgaaggaggacggccgttggtaattaaaggtgcttaccatgagatcctttttgaaaaggacgcaatgcgcagtgtcgcgctccacgccatcgttgattttttcaacaggcataacagtcccagcggaaaccgctctacagaggtttaaatttcttatgtaccaggttgttgcgtctgatttagatggcacgttactttctcccgaccatacgttatccccttacgccaaagaaactctgaagctgctcaccgcgcgcggcatcaactttgtgtttgcgaccggtcgtcaccacgttgatgtggggcaaattcgcgataatctggagattaagtcttacatgattacctccaatggtgcgcgcgttcacgatctggatggtaatctgatttttgctcataacctggatcgcgacattgccagcgatctgtttggcgtagtcaacgacaatccggacatcattactaacgtttatcgcgacgacgaatggtttatgaatcgccatcgcccggaagagatgcgcttttttaaagaagcggtgttccaatatgcgctgtatgagcctggattactggagccggaaggcgtcagcaaagtgttcttcacctgcgattcccatgaacaactgctgccgctggagcaggcgattaacgctcgttggggcgatcgcgtcaacgtcagtttctctaccttaacctgtctggaagtgatggcgggcggcgttagtaaaggccatgcgctggaagcggtggcgaagaaactgggctacagcctgaaggattgtattgcgtttggtgacgggatgaacgacgccgaaatgctgagcatggcggggaaaggctgcattatgggcagtgcgcaccagcgtctgaaagaccttcatcccgagctggaagtgattggtactaatgccgacgacgcggtgccgcattatctgcgtaaactctatttaagctaatcgttctttatttggtcagttgtcaacctgatacttcgctacaatggatacccgttaatcaaagagttttccattgtggcgctacttatcatcaccacgattctgtgggccttctcctttagcttttatggcgagtaccttgcggggcacgtcgatagctattttgcggtgctggtgcgcgttggcctggcggcactcgtttttctgccgtttctgcgtacccgtggcaatagcctgaaaacggtcggcctgtatatgctggtgggcgcgatgcagcttggcgtgatgtatatgctgagtttccgcgcttatctctacctgacggtttccgagctgctgctgttcaccgtgctgacgccgctctacatcacgctgatttatgacatcatgagtaagcgccgtctgcgctggggctatgcctttagcgccttgctggcggtgattggtgccgggattattcgctatgatcaggtcaccgaccatttctggactggcttgctgctggtgcaactctccaatatcacttttgccattggcatggtgggttacaaacgcctgatggaaactcgcccgatgccacagcataacgcctttgcgtggttctatcttggcgcgtttctggtggcagtgattgcatggttcttgctgggaaatgcgcagaaaatgccgcaaaccacgctgcaatggggcattctggtgtttcttggcgtggtggcttccgggattggctactttatgtggaactacggcgcgacgcaggtggacgccggaacgctgggcattatgaataatatgcacgttccggcagggctgctggtaaacctggctatctggcaccaacagccgcactggccaacgtttattacaggcgcgctggtgatcctggccagtctgtgggtgcatcgtaagtgggtcgctccgcgctctagtcaaacggcagatgatcgcaggcgtgattgcgcgctgagcgaataattacaggcgcgctggacttcctggcctcactgtgggtgcatcgtaagtgggtcgctccgcgctcttcacaaacggcagatgatcgcaggcgtgattgcgcgcactgcgaataaacgcttccgtaactggctgacgctgctcgccatcgcgcacggcggcgtacagtcggctccacaagccttcgcccagggttttggtcaccaccagaccctggcgctcaaaactctctactacccaatgcggtagcgcggcaatacccatccgcgcggcaaccatctgaatcaacaataaggtgttatcgacgcttttcagactcgggctgacgcctgccggctgaagaaaatgccgccagacatccagtcgactacgctgcaccggataaattaatagcgtctcgctggcgagatcttccggtgtaattcgcgttttcgccgccagtggatggtcaggtgctaacaccagacgcacttcatagtcgaacatcgggctataatgcaggccactgcgcggcagaatatcggacgtcattaccagatccagctctccctgttgcaaggcgggctgcgggtcaaatgtcacgccgcttttaaaatccatctctacctgcggccagttcttatggaaattttctaacgcgggtgtcagccactgaatacagctatggcactcaatggcaatgcgcagacgcgtctgctgcggttcattgcaggcttgcagggcctggctaatttgcggcagtacctggtttgccagttgcaacaggatttctccctgcggtgtaaagcgtagcggctggctcttacgcacaaatagccggaagccaaggcgttgttccagatcgctaaactggtgagacagggcggattgcgtctgatgcaacgtcgccgcagcggctgcgaggctgccgcagttccgcaacgcttgtagcgttttcaggtgttttacttcgatcatgaaagtccttcacttcggcatgaataatttgcgcttgaggaatatacagtaaccgccaattatggatgtgtaaacatctggacggctaaaatccttcgtcttttaaatttatggtgcgttggctgcgtttctccaccccggtcacttacttcagtaagctcccggggatgaataaacttgccgccttccctaaattcaaaatccataggatttacatataattagaggaagaaaaaatgacaatattgaatcacaccctcggtttccctcgcgttggcctgcgtcgcgagctgaaaaaagcgcaagaaagttattgggcggggaactccacgcgtgaagaactgctggcggtagggcgtgaattgcgtgctcgtcactgggatcaacaaaagcaagcgggtatcgacctgctgccggtgggcgattttgcctggtacgatcatgtactgaccaccagtctgctgctgggtaacgttccggcgcgtcatcagaacaaagatggtagcgtagatatcgacaccctgttccgtattggtcgtggacgtgcgccgactggcgaacctgcggcggcagcggaaatgaccaaatggtttaacaccaactatcactacatggtgccggagttcgttaaaggccaacagttcaaactgacctggacgcagctgctggacgaagtggacgaggcgctggcgctgggccacaaggtgaaacctgtgctgctggggccggttacctggctgtggctggggaaagtgaaaggtgaacaatttgaccgcctgagcctgctgaacgacattctgccggtttatcagcaagtgctggcagaactggcgaaacgcggcatcgagtgggtacagattgatgaacccgcgctggtactggaactaccacaggcgtggctggacgcatacaaacccgcttacgacgcgctccagggacaggtgaaactgctgctgaccacctattttgaaggcgtaacgccaaatctcgacacgattactgcgctgcctgttcagggtctgcatgttgacctcgtacatggtaaagatgacgttgctgaactgcacaagcgcctgccttctgactggttgctgtctgcgggtctgatcaatggtcgtaacgtctggcgcgccgatcttaccgagaaatatgcgcaaattaaggacattgtcggcaaacgtgatttgtgggtggcatcttcctgcagcttgctgcacagccccatcgacctgagcgtggaaacgcgtcttgatgcagaagtgaaaagctggtttgccttcgccctacaaaaatgccatgaactggcactgctgcgcgatgcgctgaacagtggtgacacggcagctctggcagagtggagcgccccgattcaggcacgtcgtcactctacccgcgtacataatccggcggtagaaaagcgtctggcggcgatcaccgcccaggacagccagcgtgcgaatgtctatgaagtgcgtgctgaagcccagcgtgcgcgttttaaactgccagcgtggccgaccaccacgattggttccttcccgcaaaccacggaaattcgtaccctgcgtctggatttcaaaaagggcaatctcgacgccaacaactaccgcacgggcattgcggaacatatcaagcaggccattgttgagcaggaacgtttgggactggatgtgctggtacatggcgaggccgagcgtaatgacatggtggaatactttggcgagcacctcgacggatttgtctttacgcaaaacggttgggtacagagctacggttcccgctgcgtgaagccaccgattgtcattggtgacattagccgcccggcaccgattaccgtggagtgggcgaagtatgcgcaaagcctgaccgacaaaccggtgaaagggatgctgacggggccggtgaccatactctgctggagcttcccgcgtgaagatgtcagccgtgaaaccatcgccaaacagattgcgctggcgctgcgtgatgaagtggccgatctggaagccgctggaattggcatcatccagattgacgaaccggcgctgcgcgaaggtttaccgctgcgtcgtagcgactgggatgcgtatctccagtggggcgtagaggccttccgtatcaacgccgccgtggcgaaagatgacacacaaatccacactcacatgtgttattgcgagttcaacgacatcatggatagcattgcggcgctggacgcagacgtcatcaccatcgaaaccagccgttccgacatggagttgctggagagctttgaagagtttgattatccaaatgaaatcggtcctggcgtctatgacattcacagcccaaacgtaccgagcgtggaatggattgaagccttgctgaagaaagcggcaaaacgcattccggcagagcgcctgtgggtcaacccggactgtggcctgaaaacgcgcggctggccagaaacccgcgcggcactggcgaacatggtgcaggcggcgcagaacttgcgtcgggggtaaaatccaaaccgggtggtaataccacccggtcttttctcattacaggctcttcttcccaccatactgcttaaaccattccagcatacgctgccagccatcttctgcagatgcggcatgatagctcgggcgataatcagcgttgaatgcatgcccggcgtccgggtacacgataatctctgctttcgcattagcagcccgcagcgcctggcgcatggtttcaacgctctcctgcggaatgctgttatcctgaccaccatataagccgagaatcggcgcgttaagatcggttgcgatatcaacaggttgtttcggactattcaggctcttgtcgcccgtcagtttgccgtaccacgccactgcggcttttagctgtggattatgcgcggcatacagccaggtgatacgtccaccccagcagaatccggtgatcattaaacgatgaacatcgccgccgttgcgggaagcccaactggcgacatgatcgagatcggccagcacctggctgtcaggcacttttgctaccagaccgctaagcaacgtggggatatcggcaaaatcattcggatcgccttcgcggaagtaaagttcaggtgcgatagccagatacccctccagcgccagacggcgacaaatgtcgcggatatgttcatgcacgccaaaaatttcctgcactacaatgaccactggcagtgggccatcgctttgctttggtctggcatggtaagcaggcatgttatccccttgactagggatagaggtgaagcccgccacaatcgcgtcgtccggggtctgaacgatggtgctagcgagagggcttgcagcaggtgcaaatccagattgttgtgttgttgccatggtattctccgtacccttataaaaatgttgcgcaatgttaactatagtcagcatgcaacaaatcacattgcctgaatcggctcatcttttatgcagtcctgcagaatgaagggtgatttatgtgatttgcatcacttttggtgggtaaatttatgcaacgcatttgcgtcatggtgatgagtatcacgaaaaaatgttaaacccttcggtaaagtgtctttttgcttcttctgactaaaccgattcacagaggagttgtatatgtccaagtctgatgtttttcatctcggcctcactaaaaacgatttacaaggggctacgcttgccatcgtccctggcgacccggatcgtgtggaaaagatcgccgcgctgatggataagccggttaagctggcatctcaccgcgaattcactacctggcgtgcagagctggatggtaaacctgttatcgtctgctctaccggtatcggcggcccgtctacctctattgctgttgaagagctggcacagctgggcattcgcaccttcctgcgtatcggtacaacgggcgctattcagccgcatattaatgtgggtgatgtcctggttaccacggcgtctgtccgtctggatggcgcgagcctgcacttcgcaccgctggaattcccggctgtcgctgatttcgaatgtacgactgcgctggttgaagctgcgaaatccattggcgcgacaactcacgttggcgtgacagcttcttctgataccttctacccaggtcaggaacgttacgatacttactctggtcgcgtagttcgtcactttaaaggttctatggaagagtggcaggcgatgggcgtaatgaactatgaaatggaatctgcaaccctgctgaccatgtgtgcaagtcagggcctgcgtgccggtatggtagcgggtgttatcgttaaccgcacccagcaagagatcccgaatgctgagacgatgaaacaaaccgaaagccatgcggtgaaaatcgtggtggaagcggcgcgtcgtctgctgtaattctcttctcctgtctgaaggccgacgcgttcggccttttgtatttttgcgtagcgcctcgcaggaaatgcctttccaactggacgtttgtacagcacaattctattttgtgcgggtaagttgttgcgtcaggaggcgttgtggatttcagtatcatggtttacgcagttattgcgttggtgggtgtggcaattggctggctgtttgccagttatcaacatgcgcagcaaaaagccgagcaattagctgaacgtgaagagatggtcgcggagttaagcgcggcaaaacaacaaattacccaaagcgagcactggcgtgcagagtgcgagttactcaataacgaagtgcgcagcctgcaaagtattaacacctctctggaggccgatctgcgtgaagtaaccacgcggatggaagccgcacagcaacatgctgacgataaaattcgccagatgattaacagcgagcagcgcctcagtgagcagtttgaaaacctcgccaaccgtatttttgagcacagcaatcgccgggttgatgagcaaaaccgtcagagtctgaacagcctgttgagcccgctacgtgaacaactggacggtttccgccgtcaggttcaggacagcttcggtaaagaagcacaagaacgccataccctgacccacgaaattcgcaatctccagcaactcaacgcgcaaatggcccaggaagcgatcaacctgacgcgcgcgctgaaaggcgacaataaaacccagggcaactggggcgaggtagtattgacgcgggtgctggaggcttccggtctgcgtgaagggtatgaatatgaaacccaggtcagcatcgaaaatgacgcccgcagccggatgcagccggatgtcatcgtgcgcctgccgcagggaaaagatgtggtgatcgacgccaaaatgacgctggtcgcctatgaacgctattttaacgccgaagacgactacacccgcgaaagcgcgctacaggaacatatcgcgagcgtgcgtaaccatatccgtttgctgggacgcaaagattatcaacagctgccggggctgcgaactctggattacgtgctgatgtttattcccgttgaacccgcttttttactggcgcttgaccgccagccggagctgatcaccgaagcgttgaaaaacaacatcatgctggttagcccgactacgctgctggtggcgctgcgcactatcgccaacctgtggcgttatgagcatcaaagccgcaacgcccagcaaatcgccgatcgtgccagcaagctgtacgacaagatgcgtttgttcatcgatgacatgtccgcgattggtcaaagtctcgacaaagcgcaggataattatcggcaggcaatgaaaaaactctctagtgggcgcggaaatgtgctggcgcaggcagaagcgtttcgcggtttaggagtagaaattaaacgcgagattaatccggatttggctgaacaggcggtgagccaggatgaagagtatcgacttcggagcgttccggagcagccgaatgatgaagcttatcaacgcgatgatgaatataatcagcagagccgctaacccattgggagtagttaagccgggtagaaatctagggcatcgacgcccaatctgttacacttctggaacaattttttgatgagcaggcattgagatggtggataagagtcaagaaacgacgcactttggttttcagaccgtcgcgaaggaacaaaaagcggatatggtcgcccacgttttccattccgtggcaagtaaatacgatgtcatgaatgatttgatgagttttggtattcatcgtttgtggaagcgattcacgattgattgcagcggcgtacgccgtgggcagaccgtgctggatctggctggtggcaccggcgacctgacagcgaaattctcccgcctggtcggagaaactggcaaagtggtccttgctgatatcaatgaatccatgctcaaaatgggccgcgagaagctgcgtaatatcggtgtgattggcaacgttgagtatgttcaggcgaacgctgaggcgctgccgttcccggataacacctttgattgcatcaccattagctttggtctgcgtaacgtcaccgacaaagataaagcactgcgtagtatgtatcgcgtgctgaaacccggcggccgcctgctggtgcttgagttcagcaagccaattatcgagccgctgagcaaagcctatgatgcatactccttccatgtgctgccgcgtattggcagtctggtcgcgaacgacgccgacagctaccgttatctggcagaatccatccgtatgcatcccgatcaggataccctgaaagccatgatgcaggatgccggattcgaaagtgtcgactactacaatctgacggcaggggttgtggcgctgcatcgtggttataagttctgacaggagaccggaaatgccttttaaacctttagtgacggcaggaattgaaagtctgctcaacaccttcctgtatcgcagtcccgcgctgaaaacggcccgcagccgtctgctgggtaaagtattgcgcgtggaggtaaaaggctttagcacgagtttgattctggtgttcagcgaacgccaggttgatgtactgggcgaatgggcaggcgatgctgactgcaccgttatcgcctacgccagtgtgttgccgaaacttcgcgatcgccagcagcttaccgcactgattcgcagtggtgagctggaagtgcagggcgatattcaggtggtgcaaaacttcgttgcgctggcagatctggcagagttcgaccctgcggaactgctggccccttataccggtgatatcgccgctgaaggaatcagcaaagccatgcgcggaggcgcaaagttcctgcatcacggcattaagcgccagcaacgttatgtggcggaagccattactgaagagtggcgtatggcacccggtccgcttgaagtggcctggtttgcggaagagacggctgccgtcgagcgtgctgttgatgccctgaccaaacggctggaaaaactggaggctaaatgacgccaggtgaagtacggcgcctatatttcatcattcgcacttttttaagctacggacttgatgaactgatccccaaaatgcgtatcaccctgccgctacggctatggcgatacagtttattctggatgccaaatcggcataaagacaaacttttaggtgagcgactacgactggccctgcaagaactggggccggtttggatcaagttcgggcaaatgttaagtacccgccgcgatctttttccaccgcatattgccgatcagctggcgttattgcaggacaaagttgctccgtttgatggcaagctggcgaagcagcagattgaagctgcaatgggcggcttgccggtagaagcgtggtttgacgattttgaaatcaagccgctggcttctgcttctatcgcccaggttcataccgcgcgattgaaaagcaatggtaaagaggtggtgattaaagtcatccgcccggatattttgccggttattaaagcggatctgaaacttatctaccgtctggctcgctgggtgccgcgtttgctgccggatggtcgccgtctgcgcccaaccgaagtggtgcgcgagtacgaaaagacattgattgatgaactgaatttgctgcgggaatctgccaacgccattcagcttcggcgcaattttgaagacagcccgatgctctacatcccggaagtttaccctgactattgtagtgaagggatgatggtgatggagcgcatttacggcattccggtgtctgatgttgcggcgctggagaaaaacggcactaacatgaaattgctggcggaacgcggcgtgcaggtgttcttcactcaggtctttcgcgacagctttttccatgccgatatgcaccctggcaacatcttcgtaagctatgaacacccggaaaacccgaaatatatcggcattgattgcgggattgttggcagcctaaacaaagaagataaacgctatctggcagaaaactttatcgccttctttaatcgcgactatcgcaaagtggcagagctacacgtcgattctggctgggtgccaccagataccaacgttgaagagttcgaatttgccattcgtacggtctgtgaacctatctttgagaaaccgctggccgaaattagctttggacatgtactgttaaatctgtttaatacggcgcgtcgcttcaatatggaagtgcagccgcaactggtgttactccagaaaaccctgctctacgtcgaaggggtaggacgccagctttatccgcaactcgatttatggaaaacggcgaagcctttcctggagagctggattaaagatcaggtcggtattcctgcgctggtgagagcatttaaagaaaaagcgccgttctgggtcgaaaaaatgccagaactgcctgaattggtttacgacagtttgcgccagggcaagtatttacagcacagtgttgataagattgcccgcgagcttcagagtaatcatgtacgtcagggacaaagccgttattttctcggaattggcgctacgttagtattaagtggcacattcttgttggtcagccgacctgaatgggggctgatgcccggctggttaatggcaggtggtctgatcgcctggtttgtcggttggcgcaaaacacgctgattttttcatcgctcaaggcgggccgtgtaacgtataatgcggctttgtttaatcatcatctaccacagaggaacatgtatgggtggtatcagtatttggcagttattgattattgccgtcatcgttgtactgctttttggcaccaaaaagctcggctccatcggttccgatcttggtgcgagcatcaaaggctttaaaaaagcaatgagcgatgatgaaccaaagcaggataaaaccagtcaggatgctgattttactgcgaaaactatcgccgataagcaggcggatacgaatcaggaacaggctaaaacagaagacgcgaagcgccacgataaagagcaggtgtaatccgtgtttgatatcggttttagcgaactgctattggtgttcatcatcggcctcgtcgttctggggccgcaacgactgcctgtggcggtaaaaacggtagcgggctggattcgcgcgttgcgtagtctggcgacaacggtgcagaacgaactgacccaggagttaaaactccaggagtttcaggacagtctgaaaaaggttgaaaaggcgagcctcactaacctgacgcccgaactgaaagcgagcatggatgaactacgccaggccgcggagagcatgaagcgttcctacgttgcaaacgatcctgaaaaggcgagcgatgaagcgcacaccatccataacccggtggtgaaagataatgaagctgcgcatgagggcgtaacgcctgccgctgcacaaacgcaggccagtagcccggaacagaagccagaaaccacgccagagccggtggtaaaacctgctgcggacgctgaaccgaaaaccgctgcaccttcccctagcagcagtgataaaccgtaaacatgtctgtagaagatactcaaccgcttatcacgcatctgattgagctgcgtaagcgtctgctgaactgcattatcgcggtgatcgtgatattcctgtgtctggtctatttcgccaatgacatctatcacctggtatccgcgccattgatcaagcagttgccgcaaggtagtacgatgatcgccaccgacgtggccagcccgttctttacgccgatcaagctgacctttatggtgagcctgattctgagtgcgccggtgattctctatcaggtgtgggcatttatcgccccagcgctgtataagcatgaacgtcgcctggtggtgccgctgctggtttccagctctctgctgttttatatcggcatggcattcgcctactttgtggtctttccgctggcatttggcttccttgccaataccgcgccggaaggggtgcaggtatccaccgacatcgccagctatttaagcttcgttatggcgctgtttatggcgtttggtgtctcctttgaagtgccggtagcaattgtgctgctgtgctggatggggattaccagcccagaagacttacgcaaaaaacgcccgtatgtgctggttggtgcattcgttgtcgggatgttgctgacgccgccggatgtcttcagccaaacgctgttggcgatcccgatgtactgtctgtttgaaatcggtgtcttcttcagtcgcttttacgttggtaaagggcgaaatcgggaagaggaaaacgacgctgaagcagaaagcgaaaaaactgaagaataaattcaaccgcccgtcagggcggttgtcatatggagtacaggatgtttgatatcggcgttaatttgaccagtagccaatttgcgaaagaccgtgatgatgttgtagcgtgcgcttttgacgcgggagttaatgggctactcatcaccggcactaacctgcgtgaaagccagcaggcgcaaaagctggcgcgtcagtatagctcctgttggagtacggcgggcgtacatcctcacgacagcagccagtggcaagctgcgactgaagaagcgattattgagctggccgcgcagccagaagtggtggcgattggtgaatgtggtctcgactttaaccgcaactttagcacgccggaagagcaggaacgcgcttttgttgcccagctacgcattgccgcagatttaaacatgccggtatttatgcactgtcgcgatgcccacgagcggtttatgacattgctggagccgtggctggataaactgcctggtgcggttcttcattgctttaccggcacacgcgaagagatgcaggcgtgcgtggcgcatggaatttatatcggcattaccggttgggtttgcgatgaacgacgcggactggagctgcgggaacttttgccgttgattccggcggaaaaattactgatcgaaactgatgcgccgtatctgctccctcgcgatctcacgccaaagccaagttcccggcgcaacgagccagcccatctgccccatattttgcaacgtattgcgcactggcgtggagaagatgccgcatggctggctgccaccacggatgctaatgtcaaaacactgtttgggattgcgttttaaagtttgcggaactcggtattcttcacactgtgcttaatctctttattaataagattaagcaatagcatggagcgagcctcaccatcgggttcggtgaaaatggcctgaaagccttcgaacgcgccttcggtaataatcaccttatcacccggataaggggttgccggatcgacaatgtctttcggtttatatacgcttagctgatgaataaccgcgcttgggactatcgctgggctcgcgccaaagcgcacgaagtggctgacaccgcgggtcgcgttgatagtcgtggtatgaatcacttctgggtcaaattccacaaacaggtagttggggaacaatggctcactgactgcagtacgttttccacgcacgattttttccagggtgatcatcggtgccaggcaattcacagcctgtctttcgaggtgttcctgggcacgttgaagttgcccgcgcttgcagtacagtaaataccaggattgcataatgactcttatccgtttaatcggggcgcaaggatagcaaaagctttacgctaagttaattatattccccggtttgcgttataccgtcagagttcacgctaatttaacaaatttacagcatcgcaaagatgaacgccgtataatgggcgcagattaagaggctacaatggacgccatgaaatataacgatttacgcgacttcttgacgctgcttgaacagcagggtgagctaaaacgtatcacgctcccggtggatccgcatctggaaatcactgaaattgctgaccgcactttgcgtgccggtgggcctgcgctgttgttcgaaaaccctaaaggctacagtatgccggtgctgtgcaacctgttcggtacgccaaagcgcgtggcgatgggcatggggcaggaagatgttagcgcgctgcgtgaagttggtaaattattggcgtttctgaaagagccggagccgccaaaaggtttccgcgacctgtttgataaactgccgcagtttaagcaagtattgaacatgccgacaaagcggctgcgtggtgcgccctgccaacaaaaaatcgtctctggcgatgacgtcgatctcaatcgcattcccattatgacctgctggccggaagatgccgcgccgctgattacctgggggctgacagtgacgcgcggcccacataaagagcggcagaatctgggcatttatcgccagcagctgattggtaaaaacaaactgattatgcgctggctgagccatcgcggcggcgcgctggattatcaggagtggtgtgcggcgcatccgggcgaacgtttcccggtttctgtggcgctgggtgccgatcccgccacgattctcggtgcagtcactcccgttccggatacgcttagtgagtatgcgtttgccggattgctacgtggcaccaagaccgaagtggtgaagtgtatctccaatgatcttgaagtgcccgccagtgcggagattgtgctggaagggtatatcgaacaaggcgaaactgcgccggaagggccgtatggcgaccacaccggttactataatgaagtcgatagtttcccggtatttaccgtgacgcatattacccagcgtgaagatgcgatttaccattccacctataccgggcgtccgccagatgagcccgcggtgctgggtgtcgcactgaacgaagtgtttgtgccgattctgcaaaaacagttcccggaaattgtcgatttttacctgccgccggaaggctgctcttatcgcctggcggtagtgacaatcaaaaaacagtacgccggacacgcgaagcgcgtcatgatgggcgtctggagcttcttacgccagtttatgtacactaaatttgtgatcgtttgcgatgatgacgttaacgcacgcgactggaacgatgtgatttgggcgattaccacccgtatggacccggcgcgggatactgttctggtagaaaatacgcctattgattatctggattttgccagccctgtctccgggctgggtagtaaaatggggctggatgccacgaataaatggccgggggaaacccagcgtgaatggggacgtcccatcaaaaaagatccagatgttgtcgcgcatattgacgccatctgggatgaactggctatttttaacaacggtaaaagcgcctgatgcgcgtttgttttgccctatttatcgatccgacagagaaagcgcatgacaaccttaagctgtaaagtgaccagcgtagaagctatcacggataccgtatatcgtgtccgcatcgtgccagacgcggccttttcttttcgtgctggtcagtatttgatggtagtgatggatgagcgcgacaaacgtccgttcagtatggctagcacgccggatgaaaaagggtttatcgagctgcatattggcgcttctgaaatcaacctttacgcgaaagcagtcatggaccgcatcctcaaagatcatcaaatcgtggtcgacattccccacggagaagcgtggctgcgcgatgatgaagagcgtccgatgattttgattgcgggcggcaccgggttctcttatgcccgcagcattttgctgacagcgttggcgcgtaacccaaaccgtgatatcaccatttactggggcgggcgtgaagagcagcatctgtatgatctctgcgagcttgaggcgcttagcttgaagcatcctggtctgcaagtggtgccggtggttgaacaaccggaagcgggctggcgtgggcgtactggcaccgtgttaacggcggtattgcaggatcacggtacgctggcagagcatgatatctatattgccggacgttttgagatggcgaaaattgcccgcgatctgttttgcagtgagcgtaatgcgcgggaagatcgcctgtttggcgatgcgtttgcatttatctgagatataaaaaaacccgcccctgacaggcgggaagaacggcaactaaactgttattcagtggcatttagatctatgacgtatctggcaaaccatgcccgatgcgacgctgtcgcgtcttatcgtgcctacaaatagtccgaaccgtaggccggataaggcgtttacgccgcatccggcaattggtgcatgatgcctgatgcgacgctgtcgcgtcttatcgtgcctacaaatagtccgaaccgtaggccggataaggcgtttacgccgcatccggcaattggtgcatgatgcctgatgcgacgctggcgcgtcttatcaggcctacattggtgccggatcggtagaccggataaggcgttcacgccgcatccggcaagtggttaaacccgctcaaacaccgtcgcaataccctgacccagaccgatacacatcgtcgccagaccaaactgaacgtctttgcgttccatcagattcagcagcgtggtgctgatacgcgcaccggaacaacccagcggatgacccagcgcgatcgcgccaccgttgaggttgatcttctcgtcaatctgctcaattagtcccagatctttaatacatggcaggatctgcgcggcaaaggcttcgttcatttcaaacacgccgatatcgctggcagaaagccccgcttttttcagcgccagtttgctggccggaaccgggccgtaacccataatgcttgggtcacaaccaacgaccgccatgctacgcacacgagcgcgcggcttaagacctaattcatgggcgcggctttcactcatcaccagcatggcagctgcgccatcggaaagtgcagaagatgtgcccgccgttaccataccgtttactggatcaaacgccggacgcagcgtggcgagggcttccacggtggtttccgggcgaatcacttcgtcgtaattaaactgcttcaggacgccgtcggcatcgtgaccaccggtcgggatgatttcatttttaaatgcggcgctctgcgtggcggcccaggcgcgggcgtgactccgcgcggcaaaggcatcctgcatttcacggctgataccgtgcatacgcgccagcatttctgccgttaagcccatcatgcccgccgctttggcgacattgcggctcaggccggggtgaaaatcgacgccgtgactcatcggcacatggcccatatgctccacgccgccaaccagacatgcctgcgcatcgccagtcatgatcattcgtgctgcgtcatgcagtgcctgcatggaactaccacacaagcgattaacggtaaccgccgggacagagtgtggtacttctgccagcagcgccgcgttacgggcgatattaaaaccctgctccagcgtctgctgcacacaaccccagtaaatatcgtcgagggccgccgcttccagcgccgggttacgcgccagcaggctacgcattaaatgagcggagagatcttctgcacgcacgttacgaaaagcaccgcccttgctacggcccatcggggtgcgaattgcatcgacaatgacaacctgttccattgtgactccttaagccgttttcaggtcgccaaccggacgggctggctcaaccggaggatagtacggttcgttatgacgcgctttattacgcagaccttccggcacttcatacagcgggccgaggtgctgatattgctgtgccatatcgaggtattttgcgctaccgagggtgtccagccagcggaacgcgccgccgtggaacggagggaagcccaggccgtagaccagcgccatatccgcttccgccggagtggcgataatgccttcctccagacagcgcaccacttcgttgaccatcgggatcatcatgcgggcgataatctcttcttcgctgaaatcgcgcttcggctggctcacttctgccagcaggtcttcaacggcggcgtcttcttctttcttcggcttacctttgctgtcttctttataacgccagaaaccgaggccgttcttctgaccaaagcggttggcatcaaacagcgcgtcgatggcatcgcggtaatctttctgcatccgctgcgggaagcctgctgccatgacagcctgagcgtgatgcgcggtatcaatgcccacaacgtccagcagatatgccgggcccatcggccagccaaactgtttttccatcactttgtcgatcttgcggaaatccgcgccgtcgcgcagcagctggctgaaaccggcgaaatacgggaacagcacgcggttaacaaagaagccggggcagtcgttaaccacaatcggcgtcttgcccatcttgctcgcccaggcgacaactttcgcgatggtttcgtcggagcttttctcgccgcgaataatttctaccaacggcattcggtggaccgggttaaagaagtgcatcccgcagaagttttccgggcgttccagcgcgttggccagttcgctgataggaatggtactagtgttagacgccagcacggtatcctggcgtactttttgttcggtttctgccagtacggcttttttcactttcgggttttcaacaaccgcttctaccacaatatccacgcggtcaaatccggcgtagtcgagcgttgggtggattgtggagatcacgccagccagtttcagaccatcgatcttgccgcgctcaagctgcttgttcagcagtttcgcggcttcggtcatgccgagggttaagctcttgtcgttgatatctttcatgacaaccggcacgcctttccacgcagactggtaagcgatgccgccgcccataatgcctgcacccagcaccgcggcctgtttcggggtttcaacgtctttggtgagtttcttcgctttgccttttacatattgatcgttaaggaaaatgccgaccagtgcgcgggcttcgttggtatgcgccagcgggacaaaacttttgttttccaggtttaaggcttcttcacgaccaaaacgggccgcagcttcaatggtttttactgcggtgatgggggccggataatgtttccccgctgtttgtgcgaccatccctttagcgatggtgaagctcatggtggcttcaatcttgctcagttttagtggttccagcttcggctgacgttttgctttccagtcgaggtcgccgttaatggcctggcgtaaaaccgcctttgcgccttcaaccagtttttctgctttgactacgccatccaccagaccgattttcagcgcctgatccgcgccgacatctttaccggcggcaatgatttccagcgcactgtcagcgcccagcatacgtggcatacgtacagaaccgccaaagccaggcatgatgcccagtttggtttccggcagaccgatgcgcagatccggcgtcgccagacgataatcggtcgccagcacgcattcgcagccaccgcccagcgcatagccattgacggcagcaatggtcggcaccggcagatcttccaggcgattaaacacgctattggcaaagtgcagccactgacttaactgttcttcaggaacgaggaacagggacaaaaattcggtgatatcagcaccgacgataaaggctgctttgttgctacgcagcagcagcccttttagatcactttgctgttccagcacgccgatggcctcgccgaggctggcgacggtcgcagtgtcgagtttattaacactacctggggcatcaaataccagttcggcaatgccatcttccagccagtcaaggtacagggtgtcgcctttgtaaagcatgtcagtctcctgaatccgcaaggtgatctggtcgtaccagatgagtcgaagtgtgtattttgtgttaaaaatatgcaaacaaaagattaaagaaatgccgatctgatcacgctcggcagaaatcacgctctggatgaacgatgtgctaagatgcggagacttaaggtcaaaaaaacagaagggtaaaaaatggaaagtctggccagcctctataaaaatcatatagctaccttacaagaacggactcgcgatgcgctggcgcgcttcaagctggatgcgttacttattcactccggcgagctgttcaatgtttttctcgacgatcatccctatccgtttaaagtgaacccgcaattcaaagcgtgggtgccggtaactcaggtgccaaactgctggttgctggtggatggcgtgaacaagccgaaactgtggttctatctgccggttgattactggcacaacgtcgaaccgctgccgacctctttctggactgaagatgtggaagtgatcgcgctgccgaaagccgatggcattggtagcctgctgcctgctgcgcgcggcaatatcggttatatcggtccggtgccggaacgtgcgctgcaactgggtattgaggccagcaacatcaacccgaaaggggttatcgactacctgcattactatcgctccttcaaaactgagtacgaactggcctgtatgcgtgaagcgcagaaaatggcggtcaacggtcaccgcgcggcagaagaagcgttccgttctggcatgagcgagttcgatatcaacattgcctatctgaccgcgaccggtcatcgtgataccgacgtaccttacagcaacattgtggcgcttaacgaacacgctgcggtactgcattacaccaaactggaccatcaggcaccggaagagatgcgcagcttcctgctggatgccggggcagaatataacggctatgcggctgacctgacccgtacctggagcgcaaaaagtgacaacgactacgcgcagctggtgaaggacgttaatgatgaacaactggcgctgatcgccaccatgaaagcaggcgtcagctatgtggattaccacatccagttccatcagcgcatcgccaaactgctgcgtaaacatcaaatcatcaccgatatgagtgaagaagcgatggtcgaaaacgatcttaccgggccgtttatgccgcatggtatcggccatccgctgggcctgcaggtgcatgacgtcgctggttttatgcaggatgatagcggtacgcacctcgcggcaccggcaaaatatccgtacctgcgctgcacccgtattctccagccgggcatggtgttaaccatcgaaccgggtatctacttcatcgaaagcctactggcaccgtggcgtgaagggcagttcagcaagcacttcaactggcagaaaattgaagcactgaaaccgttcggcggcattcgtatcgaagacaacgtggtgatccacgaaaacaacgtggaaaacatgacccgggatctgaaactggcgtgatggaaagctggttaattcctgcggcaccggtcacggtcgttgaagagatcaaaaagagccgcttcataacgatgttggcgcataccgatggcgttgaggcggcgaaagcgtttgttgaaagcgtgcgggcagaacaccccgatgcccggcaccattgcgtggcgtgggtcgcgggtgcgccggatgattctcaacagctgggtttctctgacgacggggagccggcgggaacggcaggtaaaccgatgctcgcccagctaatgggcagcggcgtcggggaaattaccgctgtggtagtgcgctactacggcggcatattgcttggcaccggtgggttagtgaaagcgtatggcggcggcgtgaatcaggcgctgcgccagctaacgacccaacgcaagacgccattaaccgaatatactttgcaatgtgaatatcatcagttaaccggcattgaagcgttgctggggcagtgtgacggcaaaattatcaacagtgattatcaggcattcgttctgctgcgggtggcgcttccggcggcgaaagtggctgaattttccgcaaagctggcggattttagccgtggtagtttgcaattgttagcgattgaagaataatccccacttcgttttgcagaactaaggaagcggcagagatgcattttcgcgccattacccgaatcgttggactactggtcatcttatttagtgggaccatgattatccctgggctggtagcactcatctaccgggatggagcgggccgcgcttttacccagaccttttttgtcgccctcgccattggctctatgctgtggtggccgaaccgcaaagagaaaggcgaacttaaatcccgtgaggggtttctgatagtggtgctgttctggaccgtgctgggtagcgtcggtgcgctcccttttatcttcagcgaaagcccgaacctcacgattaccgatgcgttttttgaatctttctctggcctgaccactacgggagccactacgctggtggggctggatagcctccctcacgccatcctcttttatcgccagatgctgcaatggtttggcgggatggggatcatcgtgttggcggttgcgatactgcctatcctcggcgtgggtgggatgcagctctatcgcgcagaaatgcccggcccgctgaaagataacaaaatgcgcccgcgaattgcggaaacggcgaaaaccctgtggttgatttatgtcttgctgaccgtcgcctgtgcgctggcgttgtggtttgccggaatggatgcctttgatgccatcggccatagctttgcgactatcgctattggcggcttcagcacacatgatgccagtatcggttatttcgatagcccgactattaacactatcattgctatcttcctgctgatctccggctgtaactacggtctgcactttagtctgttaagtgggcgtagtctgaaggtttattggcgcgatccggaatttcgcatgtttatcggcgtacagtttacgctggtggttatttgtaccctcgtactgtggtttcataatgtctacagtagcgcgctgatgacaattaaccaggcgtttttccaggtggtgagcatggcgacaaccgccgggtttacaactgacagcattgcccgctggccgctctttttgccggtactgcttttatgtagtgcctttatcggcggttgcgccgggagtacgggcggtggcctgaaggtgatccgcatcctgctgctgtttaagcaggggaaccgtgagctgaaacgactggtgcatccgaacgccgtctatagcattaagctggggaatcgcgcactgccggaacgtatcctcgaagccgtttggggatttttctccgcctatgcattggtgtttattgtcagtatgctggcgattatcgccacgggcgtggatgacttttctgcctttgcgagcgttgttgcgacattgaataacctggggccagggcttggcgtggttgctgataactttaccagtatgaacccggtggctaaatggatcctgattgccaacatgctgtttggtcgtctcgaggtctttacattgctggtgctctttaccccgactttctggcgtgaatgatggagtaatacgtgaaaacattaattcttttcagtacaagggacggacaaacgcgcgagattgcctcctacctggctagcgaactgaaagaactggggatccaggcggatgtcgccaatgtgcaccgcattgaagaaccacagtgggaaaactatgaccgtgtggtcattggtgcttctattcgctatggtcactaccatagtgcgttccaggaatttgtcaaaaaacatgcgacgcggctgaatagcatgccgagcgccttttactccgtgaatctggtggcgcgcaaaccggagaagcgtactccacagaccaacagctacgcgcgcaagtttctgatgaacagccaatggcgtcccgatcgctgcgcggtcattgccggggcgctgcgttacccacgttatcgctggtacgaccgttttatgatcaagctgattatgaagatgagtggcggtgaaacggatacgcgcaaagaagttgtctataccgattgggagcaggtggcgaatttcgcccgagaaatcgcccatttaaccgacaaaccgacgctgaaataagcataaagaataaaaaatgcgcggtcagaaaattattttaaatttcctcttgtcaggccggaataactccctataatgcgccaccactgacacggaacaacggcaaacacgccgccgggtcagcggggttctcctgagaactccggcagagaaagcaaaaataaatgcttgactctgtagcgggaaggcgtattatgcacaccccgcgccgctgagaaaaagcgaagcggcactgctctttaacaatttatcagacaatctgtgtgggcactcgaagatacggattcttaacgtcgcaagacgaaaaatgaataccaagtctcaagagtgaacacgtaattcattacgaagtttaattctttgagcgtcaaacttttaaattgaagagtttgatcatggctcagattgaacgctggcggcaggcctaacacatgcaagtcgaacggtaacaggaagaagcttgcttctttgctgacgagtggcggacgggtgagtaatgtctgggaaactgcctgatggagggggataactactggaaacggtagctaataccgcataacgtcgcaagaccaaagaggggtaccttcgggcctcttgccatcggatgtgcccagatgggattagctagtaggtggggtaacggctcacctaggcgacgatccctagctggtctgagaggatgaccagccacactggaactgagacacggtccagactcctacgggaggcagcagtggggaatattgcacaatgggcgcaagcctgatgcagccatgccgcgtgtatgaagaaggccttcgggttgtaaagtactttcagcggggaggaagggagtaaagttaatacctttgctcattgacgttacccgcagaagaagcaccggctaactccgtgccagcagccgcggtaatacggagggtgcaagcgttaatcggaattactgggcgtaaagcgcacgcaggcggtttgttaagtcagatgtgaaatccccgggctcaacctgggaactgcatctgatactggcaagcttgagtctcgtagaggggggtagaattccaggtgtagcggtgaaatgcgtagagatctggaggaataccggtggcgaaggcggccccctggacgaagactgacgctcaggtgcgaaagcgtggggagcaaacaggattagataccctggtagtccacgccgtaaacgatgtcgacttggaggttgtgcccttgaggcgtggcttccggagctaacgcgttaagtcgaccgcctggggagtacggccgcaaggttaaaactcaaatgaattgacgggggcccgcacaagcggtggagcatgtggtttaattcgatgcaacgcgaagaaccttacctggtcttgacatccacggaagttttcagagatgagaatgtgccttcgggaaccgtgagacaggtgctgcatggctgtcgtcagctcgtgttgtgaaatgttgggttaagtcccgcaacgagcgcaacccttatcctttgttgccagcggtccggccgggaactcaaaggagactgccagtgataaactggaggaaggtggggatgacgtcaagtcatcatggcccttacgaccagggctacacacgtgctacaatggcgcatacaaagagaagcgacctcgcgagagcaagcggacctcataaagtgcgtcgtagtccggattggagtctgcaactcgactccatgaagtcggaatcgctagtaatcgtggatcagaatgccacggtgaatacgttcccgggccttgtacacaccgcccgtcacaccatgggagtgggttgcaaaagaagtaggtagcttaaccttcgggagggcgcttaccactttgtgattcatgactggggtgaagtcgtaacaaggtaaccgtaggggaacctgcggttggatcacctccttaccttaaagaagcgttctttgaagtgctcacacagattgtctgatgaaaatgagcagtaaaacctctacaggcttgtagctcaggtggttagagcgcacccctgataagggtgaggtcggtggttcaagtccactcaggcctaccaaatttgcacggcaaatttgaagaggttttaactacatgttatggggctatagctcagctgggagagcgcctgctttgcacgcaggaggtctgcggttcgatcccgcatagctccaccatctctgtagtgattaaataaaaaatacttcagagtgtacctgcaaaggttcactgcgaagttttgctctttaaaaatctggatcaagctgaaaattgaaacactgaacaacgaaagttgttcgtgagtctctcaaattttcgcaacacgatgatgaatcgaaagaaacatcttcgggttgtgaggttaagcgactaagcgtacacggtggatgccctggcagtcagaggcgatgaaggacgtgctaatctgcgataagcgtcggtaaggtgatatgaaccgttataaccggcgatttccgaatggggaaacccagtgtgtttcgacacactatcattaactgaatccataggttaatgaggcgaaccgggggaactgaaacatctaagtaccccgaggaaaagaaatcaaccgagattcccccagtagcggcgagcgaacggggagcagcccagagcctgaatcagtgtgtgtgttagtggaagcgtctggaaaggcgtgcgatacagggtgacagccccgtacacaaaaatgcacatgctgtgagctcgatgagtagggcgggacacgtggtatcctgtctgaatatggggggaccatcctccaaggctaaatactcctgactgaccgatagtgaaccagtaccgtgagggaaaggcgaaaagaaccccggcgaggggagtgaaaaagaacctgaaaccgtgtacgtacaagcagtgggagcacgcttaggcgtgtgactgcgtaccttttgtataatgggtcagcgacttatattctgtagcaaggttaaccgaataggggagccgaagggaaaccgagtcttaactgggcgttaagttgcagggtatagacccgaaacccggtgatctagccatgggcaggttgaaggttgggtaacactaactggaggaccgaaccgactaatgttgaaaaattagcggatgacttgtggctgggggtgaaaggccaatcaaaccgggagatagctggttctccccgaaagctatttaggtagcgcctcgtgaattcatctccgggggtagagcactgtttcggcaagggggtcatcccgacttaccaacccgatgcaaactgcgaataccggagaatgttatcacgggagacacacggcgggtgctaacgtccgtcgtgaagagggaaacaacccagaccgccagctaaggtcccaaagtcatggttaagtgggaaacgatgtgggaaggcccagacagccaggatgttggcttagaagcagccatcatttaaagaaagcgtaatagctcactggtcgagtcggcctgcgcggaagatgtaacggggctaaaccatgcaccgaagctgcggcagcgacactatgtgttgttgggtaggggagcgttctgtaagcctgtgaaggtgtgctgtgaggcatgctggaggtatcagaagtgcgaatgctgacataagtaacgataaagcgggtgaaaagcccgctcgccggaagaccaagggttcctgtccaacgttaatcggggcagggtgagtcgacccctaaggcgaggccgaaaggcgtagtcgatgggaaacaggttaatattcctgtacttggtgttactgcgaaggggggacggagaaggctatgttggccgggcgacggttgtcccggtttaagcgtgtaggctggttttccaggcaaatccggaaaatcaaggctgaggcgtgatgacgaggcactacggtgctgaagcaacaaatgccctgcttccaggaaaagcctctaagcatcaggtaacatcaaatcgtaccccaaaccgacacaggtggtcaggtagagaataccaaggcgcttgagagaactcgggtgaaggaactaggcaaaatggtgccgtaacttcgggagaaggcacgctgatatgtaggtgaagcgacttgctcgtggagctgaaatcagtcgaagataccagctggctgcaactgtttattaaaaacacagcactgtgcaaacacgaaagtggacgtatacggtgtgacgcctgcccggtgccggaaggttaattgatggggttagccgcaaggcgaagctcttgatcgaagccccggtaaacggcggccgtaactataacggtcctaaggtagcgaaattccttgtcgggtaagttccgacctgcacgaatggcgtaatgatggccaggctgtctccacccgagactcagtgaaattgaactcgctgtgaagatgcagtgtacccgcggcaagacggaaagaccccgtgaacctttactatagcttgacactgaacattgagccttgatgtgtaggataggtgggaggctttgaagtgtggacgccagtctgcatggagccgaccttgaaataccaccctttaatgtttgatgttctaacgttgacccgtaatccgggttgcggacagtgtctggtgggtagtttgactggggcggtctcctcctaaagagtaacggaggagcacgaaggttggctaatcctggtcggacatcaggaggttagtgcaatggcataagccagcttgactgcgagcgtgacggcgcgagcaggtgcgaaagcaggtcatagtgatccggtggttctgaatggaagggccatcgctcaacggataaaaggtactccggggataacaggctgataccgcccaagagttcatatcgacggcggtgtttggcacctcgatgtcggctcatcacatcctggggctgaagtaggtcccaagggtatggctgttcgccatttaaagtggtacgcgagctgggtttagaacgtcgtgagacagttcggtccctatctgccgtgggcgctggagaactgaggggggctgctcctagtacgagaggaccggagtggacgcatcactggtgttcgggttgtcatgccaatggcactgcccggtagctaaatgcggaagagataagtgctgaaagcatctaagcacgaaacttgccccgagatgagttctccctgactccttgagagtcctgaaggaacgttgaagacgacgacgttgataggccgggtgtgtaagcgcagcgatgcgttgagctaaccggtactaatgaaccgtgaggcttaaccttacaacgccgaaggtgttttggcggattgagagaagattttcagcctgatacagattaaatcagaacgcagaagcggtctgataaaacagaatttgcctggcggcagtagcgcggtggtcccacctgaccccatgccgaactcagaagtgaaacgccgtagcgccgatggtagtgtggggtctcctcatgcgagagtagggaactgccaggcatcaaataaaacgaaaggctcagtcggaagactgggcctttcgttttatctgttgtttgtcggtgaacgctctcctgagtaggacaaatccgccgggagcggatttgaacgttgcgaagcaacggcccggagggtggcgggcaggacgcccgccataaactgccaggcatcaaattaagcagaaggccatcctgacggatggcctttttgcattggcgcagaaaaaaatgccggatgcgacgctggcgcgtcttatccagcctactcttgcttatccgttctgcttttgcatccactccaccacaaaatcagccagcccctcaacatcattaatatccagtaatgcgacatcaagattaagcggcacatcactggctacagcaataacatgcctgtctatcactaattcttcaggtcgatgtccggctccatcgcgaaacagcacaatctttgcgatctcttcatgcttaaacccttcgaccagaatcaaatccagcttactggtatccattcgacttgcgagaaactgtagatccagctcttcttcgtctggtgtttccgtcatcaaggcccatcgttgctggctggcaacgatggtttgtgccgcgccagccttgcgcagctcatagctatctttgcctggcttatcaacatccatatcatggtgcgtatgcttaatcagccctggacggatccctctggcgcataatgccgggatcagttttttcaaaagcgtagtttttccggtaccactccacgcggcaaaggcgagtaacggtatcatcgtttttcctgccatcgggcaagctcctctggcgtattcacgttaacaaatgcatctttatgatcgctgaaatcaaccgcatgaccgccagccagacgcataaataccattacccggcgttctcctgcttgcagatattccagtaataaaggctcaatagcgcggtttaccagagcaatagtcgggtgatcgcgttcaccgtcatggacccacacgacaggcgcatctttgcgctgatgattaagcctggctgctaaatcagggggaatgtaaggcgtatcgcacgggcaaaacaaaaaccactcaccagcttcctgctgcattacactaagcattcctgccagagggcctgggtaatccgccagactatcttcaatcactttcagaccgcttgcctgatagatttcctgatgacgattagcattaaccacgacgtgagagagctgcgtcataagcgcgtcagcgacatgttgccataatggtttgccgtttaattcaagcaatcctttatctacgccgcccattcgtctggctttaccgcctgccagcacaacgcctgttatcgtcgtcatcagattcaccgatatcgcctcttttattgtgggattgaccctgctaacgtgtctgtctcaagagtaaggagcatcactatgaaatgtaaacgtctgaatgaagttattgaactcctccagccagcctggcaaaaagagccagaccttaacctgctgcaatttttgcagaaactggcgaaagagagtggttttgacggcgaactggcggatttgacggatgacattctgatctatcacctgaaaatgcgtgattccgcgaaagatgcggtgatcccgggtttgcagaaagattatgaagaagacttcaaaacggcgctgttacgcgctcgcggcgtaattaaagagtaaaagcttgtaagcggcgccaccaaaatcatcgtgaaatgatatccttcgtcattcgtaatgttttccggatgatgggatgaataacagcgcttttactttccagacactacacccggataccatcatggacgctctgtttgagcatgggatccgggtggattccggtcttaccccgcttaacagctatgaaaaccgtgtctatcaatttcaggacgaagatcgtcgacgttttgtcgtcaaattttatcgccctgaacgttggacagccgatcaaatcctcgaagaacatcaatttgcgttgcagctggtaaatgatgaagttccggtcgcagcacctgtggcctttaacggtcagactttattgaatcatcagggattttatttcgctgtttttccaagcgtcggtggtcgccagttcgaagctgataatatcgatcagatggaagcggttgggcgttatttagggcgtatgcaccagacggggcgcaaacagctttttatccatcgcccgaccatcggtttgaacgaatatctcattgagccacgcaagctgtttgaggacgctacactgataccttccgggttgaaagcggcattcctgaaagcgacagatgagctgattgccgccgttacagcacactggcgggaagatttcaccgttctgcggctacatggagactgccacgccgggaatattctctggcgcgatggtccaatgtttgttgatctggatgatgcacgtaatggtccagccgttcaggatttgtggatgttgctcaatggcgataaagccgagcagcggatgcaactggaaactattattgaagcttatgaagaatttagcgagttcgacaccgctgaaatcggactgattgaacctttacgcgccatgcgtttggtttattatcttgcctggctaatgcggcgttgggctgatcccgcgttcccgaaaaatttcccgtggttaaccggggaagattactggctgcgacagacggcgacttttatagaacaggcaaaagttctacaagaaccccctttgcaattaacacctatgtattaatcggagagagtagatcatgaaaaagatttggctggcgctggctggtttagttttagcgtttagcgcaagcgcggcgcagtatgaagatggtaaacagtacactaccctggaaaaaccggtagctggcgcgccgcaagtgctggagtttttctctttcttctgcccgcactgctatcagtttgaagaagttctgcatatttctgataatgtgaagaaaaaactgccggaaggcgtgaagatgactaaataccacgtcaacttcatgggtggtgacctgggcaaagatctgactcaggcatgggctgtggcgatggcgctgggcgtggaagacaaagtgactgttccgctgtttgaaggcgtacagaaaacccagaccattcgttctgcttctgatatccgcgatgtatttatcaacgcaggtattaaaggtgaagagtacgacgcggcgtggaacagcttcgtggtgaaatctctggtcgctcagcaggaaaaagctgcagctgacgtgcaattgcgtggcgttccggcgatgtttgttaacggtaaatatcagctgaatccgcagggtatggataccagcaatatggatgtttttgttcagcagtatgctgatacagtgaaatatctgtccgagaaaaaataattcaatgtaaattacataaagcccgtgaatattcacgggctttttttattatttaataaatataaatacattctgataatgcatcctgccgctggacattatttcagcataagtggatattcaaagttttgctgttttatcagggaatatttatatgatacgtaagagtgctacaggtgttattgttgcgttagccgtaatctggggtggtggcacatggtacacaggtacgcaaattcagcctggtgtcgaaaaatttattaaagattttaacgatgctaaaaagaaaggtgaacatgcctacgatatgacgttaagttatcaaaattttgacaaaggcttttttaattcccgttttcaaatgcaaatgacattcgataacggtgcacccgatctcaatatcaagccaggccagaaagttgtatttgatgtggatgttgagcacggtccgttgcccatcacaatgttaatgcatggtaatgtcatcccagcactggcagcggcaaaagtgaacttagtgaataatgaactgacacaaccgctatttatcgccgcgaaaaataaaagccccgtggaagcgacattgcgattcgcgtttggtggcagtttctctacgacattagatgttgcccctgcagagtatggaaagttttcttttggtgagggccagtttacttttaatggtgatggtagtagtttgtctaacctggatattgaaggcaaagtcgaagatattgttctgcaattaagtccaatgaacaaagtaacggcaaaaagttttaccattgattctctggcgcgattagaagaaaagaaatttccggttggtgaaagcgagagcaaatttaatcagattaacattatcaatcacggggaagacgttgcccaaatcgatgctttcgttgcaaaaaccaggctggatcgcgttaaagacaaagattatatcaatgtcaatctcacctacgaacttgataagttaacaaaagggaatcagcaactcggtagtggtgagtggagtttgattgctgaatctattgatcccagtgcagtgcgccaatttatcatccagtataacattgcgatgcagaagcagcttgctgcacaccctgagttagcaaacgatgaagttgctctgcaagaagtgaatgctgcattgttcaaagagtatttaccgttattacaaaaaagtgagccgaccattaaacaaccggtaagatggaagaacgcactcggcgaactaaatgccaatctggatatcagtattgccgacccagccaaatctagtagttccacaaacaaagatatcaaaagcctcaattttgatgtgaagttaccgcttaatgtcgtcacagaaaccgcaaaacagcttaatttatctgaaggaatggatgcggaaaaagcgcaaaagcaggctgataaacaaatcagcgggatgatgacattaggtcagatgtttcagttaatcacgattgacaacaataccgccagcctgcagctgcgttatacaccgggtaaagttgtttttaacggacaggagatgagcgaagaagaatttatgtctcgtgccggacgttttgttcattaaaatactcactcgcctctgctcattcagaggcgagtaaaacttacttattctgacgctgactactcatgagagacgtcagaagccggtctttttcctgccacaaactgttcagccattgctgaaaatggcgcttaaagcttttgtcattgatgtagtcgccatgtaactcatcggcaataggctgtaaatccacatgtacgacaatccgcgtcagtttaccgcttaacatatcgaagaacggctgacggttattgtccggataacacagcgtaacattaagcagtttatcgaattgtttacccagtacatttagcgccatcgcaatgcctgccgcctttggtggcaacaagttttgaaaagtggagtgggtttgctgatgtttttcttgcgtgaaacgggagccttcaacgaaattgacaatggtggtgggatgcaggcgaaacttttcacaagaacgccgagtggtttcaacatctttaccacgtcgctccggatgacgtaataaataagcgcgggaataacgcttcataaacggcatatccaggctccagcacgccaggccaagaaatggcacccaggccagctgttgcttgaggaaatatttattcatcggaatgtgcttacgaaacagcacgcacagtacgacaatatctgcccaactacggtggttacaaataagcagataccagttcttcttacttaacccttccagcccgtgaacttcccattgaaggtgtgggttcagatgcagtaataccgccagaccttcacaccagcaatacatcataaaatcacaaaaacggctaacctttcgccaaatgactggcacaggtagcaatagttttacaatcccggcaatgatgatcgggacggaacaaaaaatagtgaccaaaatggtcaatacgatactcagcaaaagggttatcgcagcgagtattctcgtcataatgaatttattcaaaaggttagccatagacagtgcgctaaagaagcgcaaggcgcagattttagcagaaaacgacccaaataacggatgatccttaaggagaaaaataattcatatctatccacattagaaaaaatcccattatctcaattattagggatggatttatttttaactgcatgaaaaacaaagacaaacatcatgctgtaaaaagcatgataataaattaaaagcgatgtaaataatttatgcacaaagttatccacatgacgatttgcgagcgatccagaagatctacaaaagattttcacgaaaagcggtgaaaaactcatgttttcatcctgtctgtggcatcctttacccataatctgataaacaggcacggacattatggttcagatcccccaaaatccacttatccttgtagatggtagttcttatctttatcgcgcatatcacgcgtttcccccgctgactaacagcgcaggcgagccgaccggtgcgatgtatggtgtcctcaacatgctgcgcagtctgatcatgcaatataaaccgacgcatgcagcggtggtctttgacgccaagggaaaaacctttcgtgatgaactgtttgaacattacaaaagtcatcgcccgccaatgccggacgatctgcgtgcacaaatcgaacccttgcacgcgatggttaaagcgatgggactgccgctgctggcggtttctggcgtagaagcggacgacgttatcggtactctggcgcgcgaagccgaaaaagccgggcgtccggtgctgatcagcactggcgataaagatatggcgcagctggtgacgccaaatattacgcttatcaataccatgacgaataccatcctcggaccggaagaggtggtgaataagtacggcgtgccgccagaactgatcatcgatttcctggcgctgatgggtgactcctctgataacattcctggcgtaccgggcgtcggtgaaaaaaccgcgcaggcattgctgcaaggtcttggcggactggatacgctgtatgccgagccagaaaaaattgctgggttgagcttccgtggcgcgaaaacaatggcagcgaagctcgagcaaaacaaagaagttgcttatctcagttaccagctggcgacgattaaaaccgacgttgaactggagctgacctgtgaacaactggaagtgcagcaaccggcagcggaagagttgttggggctgttcaaaaagtatgagttcaaacgctggactgctgatgtcgaagcgggcaaatggttacaggccaaaggggcaaaaccagccgcgaagccacaggaaaccagtgttgcagacgaagcaccagaagtgacggcaacggtgatttcttatgacaactacgtcaccatccttgatgaagaaacactgaaagcgtggattgcgaagctggaaaaagcgccggtatttgcatttgataccgaaaccgacagccttgataacatctctgctaacctggtcgggctttcttttgctatcgagccaggcgtagcggcatatattccggttgctcatgattatcttgatgcgcccgatcaaatctctcgcgagcgtgcactcgagttgctaaaaccgctgctggaagatgaaaaggcgctgaaggtcgggcaaaacctgaaatacgatcgcggtattctggcgaactacggcattgaactgcgtgggattgcgtttgataccatgctggagtcctacattctcaatagcgttgccgggcgtcacgatatggacagcctcgcggaacgttggttgaagcacaaaaccatcacttttgaagagattgctggtaaaggcaaaaatcaactgacctttaaccagattgccctcgaagaagccggacgttacgccgccgaagatgcagatgtcaccttgcagttgcatctgaaaatgtggccggatctgcaaaaacacaaagggccgttgaacgtcttcgagaatatcgaaatgccgctggtgccggtgcttagtcgcattgaacgtaacggtgtgaagatcgatccgaaagtgctgcacaatcattctgaagagctcacccttcgtctggctgagctggaaaagaaagcgcatgaaattgcaggtgaggaatttaacctttcttccaccaagcagttacaaaccattctctttgaaaaacagggcattaaaccgctgaagaaaacgccgggtggcgcgccgagtacgagcgaagaggtactggaagaactggcgctggactatccgttgccaaaagtgattctggagtatcgtggtctggcgaagctgaaaagcacctacaccgacaagctgccgctgatgatcaacccgaaaaccgggcgtgtgcatacctcttatcaccaggcagtaactgcaacgggacgtttaagcagtaccgatcctaacctgcaaaacattccggtgcgtaacgaagaaggtcgtcgtatccgccaggcgtttattgcgccagaggattatgtgattgtcagtgcggactacagccagattgaactgcgcattatggcgcatcttagccgtgacaaaggcttgctgaccgcattcgcggaaggaaaagatatccaccgggcaacggcggcagaagtgtttggtttgccactggaaaccgtcaccagcgagcaacgccgtagcgcgaaagcgatcaactttggtctgatttatggcatgagtgctttcggtctggcgcggcaattgaacattccacgtaaagaagcgcagaagtacatggacctttacttcgaacgctaccctggcgtgctggagtatatggaacgcacccgtgctcaggcgaaagagcagggctacgttgaaacgctggacggacgccgtctgtatctgccggatatcaaatccagcaatggtgctcgtcgtgcagcggctgaacgtgcagccattaacgcgccaatgcagggaaccgccgccgacattatcaaacgggcgatgattgccgttgatgcgtggttacaggctgagcaaccgcgtgtacgtatgatcatgcaggtacacgatgaactggtatttgaagttcataaagatgatgttgatgccgtcgcgaagcagattcatcaactgatggaaaactgtacccgtctggatgtgccgttgctggtggaagtggggagtggcgaaaactgggatcaggcgcactaagattcgcctgaacatgccttttttcgtaagtaagcaacataagctgtcacgttttgtgatggctattagaaattcctatgcaacaactgaaaaaaaattacaaaaagtgctttctgaactgaacaaaaaagagtaaagttagtcgcgtagggtacagaggtaagatgttctatctttcagaccttttacttcacgtaatcggatttggctgaatattttagccgccccagtcagtaatgactggggcgttttttattgggcgaaagaaaagatccgtaatgcctgatgcgctatgtttatcaggccaacggtagaattgtaatctattgaatttacgggccggatacgccacatccggcacaagcattaaggcaagaaaattattcgccgtcctgcgtttcttctacaggctgcatctcgctaaaccaggtatccagtttctgccgcagcttgtccacgccttgtttcttcaagctagaaaacgtttcaacctgcacatcaccgttaaacgccagtacagcttcacgcaccatattcaattgcgctttacgtgcgccgcttgccagtttgtccgctttggtcagcagcaccagaacggcgatattgctgtctaccgcccactcaatcatctgctgatccaaatctttcagcggatggcgaatatccattagcaccaccagaccttgcaggctctgacgtttttcgaggtattcgccgagcgcacgctgccatttgcgcttcatctcttccgggacttccgcataaccgtacccaggcaagtcaaccagacgcttgccgtcagccacttcaaacaggttgataagctgggtgcgccctggggttttactggtacgagccaggcttttctggttagtcagcgtgttcagcgcgctggatttacctgcgttggaacggcctgcaaaagccacttcaattccggtatcggaaggtaggtggcgaatatcaggcgcactcatcacaaaatgcgtctgttgataattcaaattagtcaaagcggtcgtctccgtcagtcaaagctttgtggcgattatacctgaaccataataaaaggcggatttttcggcgtgagcgttgtaagtaaaagccatacgctttgtgagacattgccgatagtctttatgcgaaatagcagagaaaattctgcgatgcatgtcaaataagctatataaatcagtgaattgcttttatataaaactctgaaaatgtgcaaatactgatggcggttgattgtttgtttaaagcaaaggcgtaaagtagcacccatagagcgaggacgctaacaggaacaatgactcaggatgagggtcaggagcgccaggaggcgaagacagaggattgtcaggaagacaaacgtccggagacgtaattaaacggaaatggaatcaacacggattgttccggctaaaggaaaaacagggtgtgttggcggcctgcaaggattgtaagacccgttaagggttatgagtcaggaaaaaaggcgacagagtaatctgtcgccttttttctttgcttgctttctgttagattccgccgcaaatctatactgaataaaacggctaaaagacgaaccattatgaaaccaagttctagtaacagtcgcagcaaaggtcatgcaaaagcgcgtcgaaaaacacgcgaggagctggatcaggaagctcgtgatcgcaagcgtcagaaaaaacgtcgtggtcatgcgccgggcagccgcgcagcgggcggaaacaccacgagtggcagcaaaggccagaacgcaccaaaagatccacgtattggcagtaaaacccctattccattgggcgtgactgaaaaagtcaccaaacagcacaaaccgaagagtgagaaacctatgcttagtccgcaggcggagttggaattactggaaacggatgagcgtctggatgcgctgctggaacgtctggaagcaggcgaaaccctgagtgccgaagagcaatcctgggtggatgctaaactggatcgtattgatgagttgatgcagaaactcggcctctcttatgacgatgacgaagaagaggaagaagacgagaagcaagaagacatgatgcgtctgctgcggggcaactaacggattgccgccgtgggccttcccgttctgctgataacccttccggttatatgttatctggtgtggttattcgttaaactacagcggttgtcgcggcgacaaaagtggctgcgcaaccggctgatgacccgaaacgggcatccgccggtacgccgtagccgccagagacgccatcggaaggagtgagcatgtctgtacagcaaatcgactgggatctggccctgatccagaaatataactattccgggccacgatacaccagctacccgaccgcgctggagtttagtgaagacttcggcgaacaggcgtttttacaagccgtggcgcgctatcctgagcgtccattatctctctacgtacatatcccgttctgccataagctttgttacttctgcggttgcaataagattgttactcgccagcagcacaaggccgatcagtatctggacgcgctggagcaagaaatcgtccatcgtgcaccgctgttcgccgggcgtcacgtcagccaattgcactggggcggcggaacgccgacgtatctgaataaagcgcaaatcagccgcctgatgaagctgctgcgcgaaaacttccagttcaatgccgatgcggagattagcatcgaagtcgatccgcgggaaatcgaactggatgtactcgatcatttacgcgccgaaggctttaatcgcctgagcatgggcgtgcaggacttcaacaaagaagtgcaacgtctggttaaccgcgagcaggatgaagagttcatctttgcactgcttaaccatgcgcgtgagattggttttacctccaccaacatcgacctgatttacggcctgccgaaacagacgccggagagtttcgcctttaccctgaaacgtgtggcggagctgaaccccgatcgtctgagtgtctttaactacgcgcatctgccgaccatttttgctgctcagcgcaaaatcaaagatgctgacctgccgagtccgcagcaaaaactcgatatcctgcaggaaaccatcgccttcctgacgcaaagcggctatcagtttatcggtatggatcactttgcccgtccggatgacgagctggcggtggcccagcgtgaaggcgtgctgcatcgtaacttccagggctacaccactcagggcgataccgatctgctggggatgggcgtttccgccatcagcatgattggcgactgctacgcgcagaaccagaaagagttgaagcagtactatcagcaagtggatgaacaaggcaatgcgctgtggcgtggtattgcgctaacgcgtgatgactgtattcgccgcgatgtgattaagagcctcatctgcaacttccgtctggattacgcccctattgagaaacagtgggatttgcacttcgctgattactttgcggaagatctcaagctgctcgccccgttagcaaaagatgggctggtggatgtggatgagaagggaatacaggtgacggcgaaaggtcgcttgctgatccgcaacatttgcatgtgctttgatacctatctgcgccagaaagcgcggatgcagcagttctctcgggtgatttaaatagtgaatggcgcttcgtttacaaagtagaaaacgaaagcgccatcaatgtgctgagaacaagattgcctgatgcgctgggcaacaaaacctgttgaaattattgcttttgtaggccggataaggcgtttacgccgcatcaggcatctgagcatgatgcctgatgcggcgctggtcgcgtcttatcaggcctacgactttctccgcatccggcataaacaacgagcttcagctaaacagcccaatcattgcggcacacagcacggcagcaacggcagtttgcggtgtgtggctgtcaactgcgccactcgataccagattaattattgattccagcataatgactctccccgttttccgggcaagatcatactgaacttatcggaacagtaaagcgtaaaataccagcaatttgcgctcaataatcaatctttacacacaagctgtgaatcactccatccccagctcttttaacttacgcgtcagggtgttgcggccccagccgagtagccgcgccgcttcctgtttatgcccctgcgtatgtcgcaacgcggtcgtcagtaacgtccgctccagctctggctgcgcttcggaaagcagattttgatgaccggaacgcagcgctctgtctgcccactgcgcaagaagcgtcgcccagctgtccggttgcatttggctagtactctccgcaaccgtactttcaaacagttcgccgggcaaatcctgaatcaacacttcctgcccggcggccatcaccgttagccagcggcaggtgttttccagctggcgcacgttgcctggccacgccagacgcgtcagagcagcttcggtttccggatgcagtaacttcgcttctacgcccagttcgcgcgcggcaacctgtaaaaaatggcgcgccagacggggaatatcttcccgacgttcgcgcagcggcggcagatgaacgcggataacgttcaggcggtggaacagatcctcacggaacttaccttcctgcactcgctgttcgagattctggtgagtggcagcgataatccgcacatccactttcaccggcgcatagccgccaacgcggtaaaactgaccgtctgccagcacgcgcagcaaacgcgtctgcacatccagcggcatatcaccaatttcgtcgaggaataatgtaccgccatcggcctgttcaaaacgcccctgacgaatggtattcgcgccagtaaacgcgcctttctcgtggccaaacagttcactttcgatcaaatcttttgggatagctgccatattcagcgcgataaacggcgctttggcgcgcggactgtggcgatgcagggcatgagcgaccagttctttaccggtgccggattcgccgttaatcagcacgctaatagaagaacggctaagccgaccgataatacggaacacgtcctgcatggctggcgcttcgccgatgatatcggtcgttgggccgttaagctgaacattacgcggctgctgctgttcctggtaatgactgatagcgcgctcaaccagcgccactgcttcgtcgatatcaaacggtttgggcagataatcaaacgccccttgttgataggcgctgacggcagcatccagatcggaatgtgcggtcataatgatgaccggaagcattggatggcgctgtttaatctgcttgagcagcgccagcccgtccattcccggcatacggatatcactaagcagcacatccggcgttttgctcgccagcgcctccagcacttctgcgccgttctcaaacgtcgtacaggttaaacctgccccagcgagcgcacgttcaagcacccaacggatggaactatcgtcatcgactacccagactatccctcgttgcataaacgtcacctttatttcctgataggcaggtaaacgctgaactcggtatgccctggccaactggtaaattcaattttgccactatgctgatcaatcaaattacgagcgatggataagccaagcccggtgccaccttcgcggccgctgaccatcgggtaaaacagcgtatcctgcaaatgaggcggaatgcccggcccgttatcttccacatcaatccgcgccgccagccggtagcgctcgccgtgtaaggtcagttgaaacgcggtgcgggtacgcagaatgatttcaccgccttccggccccagcgcctgtagcgcattgcgcacaatattcagcaagacctgttcaatttgatccgggtcgtgcgccagttccggtaggctgggatcgtaatcacgaatcaaccgcacgttgtccggcagttccatgctcaccagcgttaccacgcgttcagccactttgtgaatactttcggtaacgcgcgtaccgggcagctgcggccccaacagacggtcgaccagatttcgcagccggtccgcctgttcgataatcactttggtatattcgagtagacttgggtcaggtaacgctttgctgagcagctgcgccgcgccacgtaaaccgccaagcggatttttaatctcatgtgccaggccgcgcactaaatcacgggcagcaacctgctgggcgtgctgtagctgttcctgacttaagcggcgctggttatccatcggagccatctccagcaggatcatgccgtccggcatacgctgggccgtcacagaaaggatatggctgcgcccgtcgatgaccagcgtcacttcgttatcggtaaaaccttgccccgcctccagactttcttgcatcagctcgatatttaaactgaagtagctcaacagttccggtaacggtgtaccaaacaatttgcgggagctttgggcgagcagttgttgcgcggcagggttggcgtaatggatcgccaggttgtcatcgattaacaaaatactgttaatcaggctgttgaggatctgcccagcatcgggctgcgtgcctgttgccataaagcagtctcctgaacaggttgcaccattttagtgcattatagctttttacggataaaaagcgcgaagcatcagagaattgacggagaaaaaagcccatgcagagatgggctacagatagctgacaaacttcacgttggagagcgactcacctgctccggcctaccacatcatcaccgtgtaggccggataagacgcatttgcgtcgcatccggcgtgatgtgcttgccaccgatcccaggcctgccagagacaggcgaaaagtttccacggcaactaaaacacttagacgctgtagtacagctcaaactctaccggatgcggagtcatacgcacgcggtcatcttcttcgcgacgcagagcgatgtacgcatcaattgcttcgtcagtgaacacgccaccggctttcaggaactcgcggtccagatccagttcgttcagtgcttcttccagagagcctgcaacctgtgggatctctttcgcttcttctggcggcaggtcatacaggtttttgtccatggcttcgcccggatggatcttgttcttgataccatcaagaccggccatcagcagggcagcaaagcacaggtacgggttagctgccggatccgggaaacgtacttcgatacgacgtgctttcggagaagaaaccaccggaatacggatagacgcagaacggttacgcgcagagtaagccagcattaccggtgcttcatagcccgggaccagacgcttataagagttggtggtcgggtttgccagggcgttaatcgctttagcgtgtttgattacgccgccaatgtagtacagcgcctgctcagacagacctgcgtatttgtcgcctgcgaacaggttaacgccgtttttagacagagacatgtggcagtgcataccggagccgttatcaccgaacatcggttttggcataaaggtcgcggttttaccgaagcggtgcgctacgttgtgcacaacatatttgtagatctgaatttcgtcagcttttttggtcatggtattgaagcgggtagccacttcgttctgaccagcagtcgctacttcgtggtgatgggcttcaaccaccagacccatctgttccatcaccagacacatttcagaacgaatatcctgagcgctgtctaccggtggaaccgggaagtaaccgcctttcactgccggacggtgacctttgttaccaccttcgtattgggtggaggagttccatgcgccttcgatatcgtcgatagcaacgtgggaaccggagatagaacttccgaaacggatgtcatcgaacaggaagaattcaggttctggcccgaacagtacggtgtcggcaatgccagtggaacgcaggtaatcttcggcgcgcttcgcaatggagcgcgggtcacggtcatagccttgcagggtgccaggttcaaggatgtcgcaacggataatcagggtggagtcggcgaagaacgggtcaatcactgcggtggatgcgtctggcatcagcaccatgtcggactcgttaatgcctttccagccgccaatgctggagccgtcaaacattttgccttcttcgaagaattcagcattcacctgatgagcagggatagtgacgtgctgttctttacctttagtatcggtgaagcgcaaatcaacaaacttcacttcgtgctcgttcagcatcgtcagtacgtgttcagcggacatactttaactctcctggattggtcatggtcgtcgtggtaacgaaatctgcaattattttggccgtgtcgccgtaaaaaagataaagcgaaatctgtgccaacttttaaattgcccctaaaaggcgttatcatgcgcaccatcgtgcaaaagggctgcaccacgatgtgaatgttgcaccaatatagtgcttcaatggaaacattaagcaccatgttggtgcaatgacctttggataaccctttttatgctccgtgaaagcgatcacaaagggactctgcaatacttgtttgcggaggatgtttgtgatcctgttttgtagtgcgattaatccgtgtacaataacgcgctatttctaatgcctgaggcaaagttgtgatcgaaaaattgcgtaatatcgccatcatcgcgcacgtagaccatggtaaaaccaccctggtagacaagctgctccaacaatccggtacgttcgactctcgtgccgaaacccaagagcgcgtgatggactccaacgatttggagaaagagcgtgggattaccatcctcgcgaaaaacaccgctatcaaatggaatgattaccgtatcaacatcgttgataccccggggcacgccgacttcggtggtgaagttgaacgtgtaatgtccatggtagacagtgtgctgctggtggttgacgcatttgacggcccgatgccgcaaacgcgcttcgtaaccaaaaaagcgtttgcttacggcctgaagccgattgttgttatcaacaaagttgaccgccctggcgcgcgtcctgattgggttgtggatcaggtattcgatctgttcgttaacctcgacgcgaccgacgagcagctggacttcccgatcgtttacgcttctgcgctgaacggtatcgcgggtctggaccacgaagatatggcggaagacatgaccccgctgtaccaggcgattgttgaccacgttcctgcgccggacgttgaccttgacggtccgttccagatgcagatttctcagctcgattacaacagctatgttggcgttatcggcattggccgcatcaagcgcggtaaagtgaagccgaaccagcaggtcactatcatcgatagcgaaggcaaaacccgcaacgcgaaagtcggtaaagtgctgggccacctcggtctggaacgtatcgaaaccgatctggcggaagctggcgatatcgttgcgatcacgggccttggcgaactgaacatttctgacaccgtttgcgacacgcaaaacgttgaagcgctgccggcactctccgttgatgagccgaccgtttctatgttcttctgcgttaacaccagcccgttctgcggtaaagaaggtaagttcgtaacgtctcgtcagatcctggatcgtctgaacaaagaactggtacacaacgttgcgctgcgcgtagaagaaaccgaagacgccgatgcgttccgcgtttctggtcgtggcgaactgcacctgtctgttctgatcgaaaacatgcgtcgtgaaggtttcgaactggcggtatcccgtccgaaagttatcttccgtgaaatcgacggtcgtaaacaagagccgtatgaaaacgtgactctggacgttgaagaacagcatcagggttctgtaatgcaggcgctgggcgaacgtaaaggcgacctgaaaaacatgaatccagacggtaaaggccgcgtacgtctcgactacgtgatcccaagccgtggtctgattggcttccgttctgagttcatgaccatgacttccggtactggtctgctgtactccaccttcagccactacgacgacgtacgtccgggtgaagtgggtcagcgtcagaacggcgtactgatctctaacggtcagggtaaagcggtcgcgttcgcgctgttcggtctgcaggatcgcggtaagctgttcctcggtcacggtgcagaagtttacgaaggtcagattatcggtattcatagccgctctaacgacctgactgtaaactgcctgaccggtaagaaactgaccaacatgcgtgcttccggtactgacgaagccgttgttctggttccgcctatccgcatgactctggaacaagctctggagttcatcgatgatgacgaactggtagaagtgactccgacctctatccgtattcgtaaacgtcacctgacggaaaacgatcgtcgccgcgccaaccgcgcaccgaaagacgattaatttcgttttttagtcataaaaaacctgccagcgatggcaggtttttttttgcctgtcgtgagcgcacaccaatgcgagtatctcccttataagtctgtggttacgtcaatagagagctttgtcacaattatctgcaaagtcatacgccgttaattgctttcttttttggcgtaagcgtaagatgcttcatctggtttaaaccaaaaggattaaacaatggcggagaatcaatccaccgtagaaaatgcaaaagagaaactggatcggtggttgaaagatggcatcaccacgccgggtggaaaactccctagtgaaagagagctgggagaactgctgggcattaaacgtatgacgctgcgccaggcgttgttgaacctcgaggcagaatccaaaatcttccgtaaggatcgtaaggggtggttcgtgacccagccgcgatttaattacagtccggagctgagcgcgagctttcagcgggccgcaattgagcaagggcgagagccttcctgggggtttaccgagaaaaaccgtaccagcgatattcccgagacgctcgcgccactgattgcagtgacgccaagtactgaactctatcgcatcaccggctggggggcgctggaaggacataaagttttctatcacgaaacatatattaatcctgaagttgctccgggctttattgaacaacttgaaaaccacagtttttctgcagtctgggaaaagtgctaccaaaaagagacggtagtaaaaaaattgattttcaaacccgtcagaatgccgggcgatatcagcaagtatcttggcggttctgcgggtatgccagcgatcttaattgaaaagcatcgcgccgaccagcaaggcaatattgtccaaatagatattgaatattggcgatttgaggccgtagacctcatcattaatctgtaagtgttttatggtgacaataaataacgcaagaaagattctacaacgtgtcgacactcttcctctttatttacatgcttatgcctttcatttaaatatgcggctggaaagagtgttgcctgctgatttacttgatatcgcaagtgaaaataatctacgtggcgtcaaaatccatgttctcgatggcgagcgtttttctcttggtaatatggacgataaagaactctctgcctttggggataaagcccgccgtctgaaccttgatattcatattgaaaccagcgccagtgataaggcatctattgacgaagccgtcgccatcgcgttgaaaactggggcaagctccgtacgtttttatccacgttatgaaggtaatttgcgcgacgtattaagcattatcgctaacgacattgcctatgtacgggaaacgtatcaggacagcggcctgacttttacgatcgagcagcatgaagatttaaaaagtcatgagctggtgagcctggtcaaagaaagtgagatggaatctctttccttactgtttgattttgcgaacatgatcaatgcaaatgagcatcccatcgacgctttaaaaacgatggcaccgcatattacccaggtccatatcaaagatgccttgatcgttaaagaaccgggtggcctgggtcataaagcctgtattagtggtcagggtgatatgccgttcaaagcgttattaacgcaccttatctgcctgggtgatgatgagccgcaggtgacggcatatggcctggaagaagaggttgattactatgcgccggcgttccgctttgaagacgaagatgataatccgtggatcccttatcgccagatgagtgaaacaccattgccagaaaatcatttactggatgcgcggttacgtaaagaaaaagaagatgcaattaatcagataaatcatgtgcgtaacgtactacaacaaatcaaacaagaggcaaaccatcttctgaaccactaataagttttaactcatacgcagttaataaaaccattccatatgaatggtcggtatcttattgcctttaaaacagtgattttaaaaatcgcttaggggatgttatgctcacgaaaaagaaatgggcgttatttagtctattaacactgtgtggcggtacaatttataaattaccgagcctgaaagatgcgttttatatcccgatgcaggaatatttccatttgaccaatggtcaaattggtaatgctatgagcgtaaacagttttgtcaccacagtgggcttttttctgtctatttattttgccgataaactaccgcgcagatacaccatgagtttcagtctcattgcgacaggattactgggtgtttatttgacgacaatgccggggtattggggcatcctctttgtctgggcgctatttggcgttacttgcgacatgatgaactggccggtcttgctcaagagcgtaagtcgattgggcaatagcgaacaacaaggtcggttgtttggcttcttcgaaacagggcgtggcattgtcgataccgtggtggcattttctgcgttggcagtatttacctggtttggcagtggcttattaggttttaaagcaggcatctggttctattcccttattgtgattgccgtaggcattattattttctttgtcctgaatgacaaagaagaggcaccgtccgttgaggtgaaaaaagaagacggagcaagcaaaaacaccagtatgaccagcgtgctgaaagacaaaactatctggcttatcgcttttaacgtcttcttcgtttacgcggtttactgtggcctgacattcttcattccattcctgaaaaacatctatctattgcccgttgcgctggtgggggcttacggcatcattaaccaatactgtctgaaaatgattggtggaccgattggtggcatgattagtgataagatcctgaaaagcccaagtaaatatctatgctacacctttatcattagtaccgctgcgctcgtactgttgattatgctgccgcacgaaagtatgccggtctatttagggatggcatgtacgctgggctttggcgcgatagtctttacacagcgagccgtattttttgcacctatcggcgaagcaaaaattgctgaaaataaaacaggtgcggcgatggcgttgggtagctttattggttacgctccggcgatgttctgcttcagtctgtatggctacattctggatttaaatccggggattattggctacaaaatcgtgtttggcattatggcctgcttcgcattcagtggtgcggtggtttccgtaatgctggttaagcgtattagccaacgtaagaaagagatgctggcggctgaagcttaattaatggccggatgtgcttaatccggccaacgaaaaccgtatcaaccgtaggccggataaggcgtttacgccgcatccggcagtttcacatcagaagaaatacttcgtcccgatacggatctggttttgctcgcggtggtacggttcgacgttgcggtctaaccagcgcaattcgaaataagggagccagtgttcattaatacggtaacggaaggtgttagtgatttcccaatgatgatctttcccgttgctactattaaagtcattcactcgcatgaagtaatgtggctcaaatgtataggaaaatttatcggtgattttaaaattccagtaggtgccaatttcataggtgtcattattatccagttccccgctcaaatctgtactactatagttattatggttatagcgatttcgtactgtcagattaaaccatggtacaaatttatagttgacgtccagatacactgcaccaccgctaccgatactcttatcattaattaagccaccgggctggatggttaatttatcggttggtttaaataacggataccagccttcaatttcgttatatccatgttttagttcatcttctcgctgaaagttgtaggtattggttaacataatacccgcgcccatatcgaagttataacccacacgtagcataacctcgccctgatcggaggcaagattatatgcctccctgttttcgacgtatgcgccagcaaatacgctggcagaggtcagagaagataataaaattattgcattaatctttttcataataagtccattttttaaacgtagggaggccgccacccaccaggatggaaatagcggctattgacatttataacgttacggaagccgttttttcttctgtcgccatctctttatttttgcgttggttgatttcctcaataatcaatgcaaaccgtttttcattgagtgtgtaaaagaatcccatcgtcaatgcagcaataattgccagtgcacaaggccagataaaaatgagctgacgcaaaccctgtaatgtcgcatcgctttgcgcgatgttgggaacataaccaatttgcgtcagcataatgcctggcaagaagccagcaagtgcggcagaaattttacgaaagaaggtataaccggtataaacagaaccttcggcacgaataccggttttccattcaccgtaatctacggtatctggtaccagtgcccagttcaggctgtttacaaaggccgtgccaaaaaaggcgacacaagagaacatgacgaaagtgaaagagttacttccccagaaataattcagtatatcacccaccgcccacagcaccatgccagccagataaacctgttttttaccaaaacattttacagttaatggcaccagtaatacgccgatgaggatgcatcccatactgaagaatcccatccagctcaataaattaatatcattcagcacatactgggtgtaatagacctgaatcgccagtttgatattaaatgccgccagggtacacaagttagcaatgcataaaaccagcaatggcggattccgaaatatcgcgcaaaaacttttgagaatactggctttatgtccggttggcgttgtgtccacataatgctctttgacgcctctgtagcacagcatcataaaaataaagccgccaatggagaacataagtgccgcacaggcataaccgacggtactgtcagaaaaaaggctctgcaacggaataaacgccacggtacaaatcaatagccctatggttgcaccaccctggcggtaagccgcgagctgcgcgcgctcattcgggtttttggtaattgccgggatcatcgcaccatagctgcagttcatcagactgtaactaagtccaaacatcataaacagcgcggtggcaatcgtcgttttaaccggcaaacaaaaggtggtggcgataaactggagcgttgcaattaacgccgccggaaccgctgcatataaaataaagggacgaaatttgcctttaggcccaatatttttccggctgtcgagtaaaaatccggtgagcatatcggtaaacgcggtaaaaaacttcgccaccagaaagataatcccgccatagtaagcaggcatccctaattcatcggtataaaatttgaggagatacagagtaccgatgcagagcattaaattgctaccgacgtcgcccataccataggcgattttttcccgcagattcagttttaatgtcagtggattatggtcagacataatcactccttataacgccccgcagggcgtcgtttattattattacgccgtgcgtttacgggcttctatctcttccacaatgcggacatacatcttctcgttcaggctgtagaagcaacccatcgccacaatggtgactaccgccagtgcgcttgggtagatgaagatcaactggcgtaacccttcaatggtgtggtcagcctgtgcgacgttcggcacatagccaatttgcgtcagcatccagccggggaagaaaccagccagcgcctgagacactttgcgaaagaaggtaaaaccggtgtagaccgttccttcgctacgcacgccggtgcgccactcgccgtactcgacggtgtcggaaaccagcgcccagttcaggctgttaacaaacgcactgccaaagaacgccaggcaggagaacgccacgaagctgacgctaccgccgccgaagaaatagttgagcagatcgcccagcacccaaatcagcaggccgccgatataaactttcttcttgccaaaacgtctgacactggcaggcatcaggaatacgccgatgaaaatacagcccatgctgaaaaatcccatatagctcaacaggatgggatcgttaagcacgtactgggtgtaatagacctggatggcgagcttgacgttaaacgcccctaaagtgcagaggttggcaatgcacagaatgaacagcgggcggttacccgcaattgcgcggaaagattgcagcaggcccggcttttgcgccggattagcaggctgggtttcgacataacgctctttcacgccgctgtagcagatccacataaacagcaggccaaacagactaaacagcgtggcggcgaagatatagccaagttgctgattaccttcgataagattcataactggcacgaatcccaccgtgcacagcagcaggcccagcgtagcgccgccctgacgccatgccgccagactggcgcgttcgttggggtttttggtgatagcgggaaccattgcgccgtaggagcagttcatcatgctgaaaaacagtccgtaaagcataaacagaatagtggccatcaccgttttaccggtgacatcaaacggtgtgccgacaaagttggcgatcgccagtaaggtgaccgggaaactcgcatacagaataaaaggacggaacttaccttttggaccgatcttgcgtcgggaatccaacataatgccggtacccatatcggtaaacgcagtaaagaatttactaatcaaaaagataatgccgccataggtgcctggcagccccagaacgtcggtataaaacttcaaaagataaagcgtaccgatatccagcaggatgttagaggccaggtcgccaataccgtaagagagtttctctttaaagggcaggcgtaaagttgctggatcttccgttgtgatgtgactcatgcttgttctccctttgcccatgagtttccccacgggcggatgtgattagatgctttttaagctcgcgaacagtgccgcccattcgctatcggcgcgataaaagaccggcggcttgccgatgggcgcattaacggtaacttccccgccccggaacgcttcacccgtccaggcgtggacccagttatcctccggcagatagagcgtccagtcgctacggccttcttcatgcaccggagcgaccagaatgtcgcgacctaacaggtactgatatttcagggtgtaagtgtgcgcatcgtcttcgtaatgcaggaacagcgggcgcataaccggcaggccggacttcgcattcagcgcgacggcctctttcaggtaaggtttcagggtggtgaagacggtggtcatacgggcgaaatgggcgatggtttctgcgtcgccgtcaaactgccagttgtcgccaggacggttaccttcgtgggtgcgcatcatcggcgtgaaggcgctgaaatcgcaccagcgcagcagcagctctttgctgcgcttcatctcaaacagggtggtgtaaccgccaatgtcgctgtggtgcaggccatgtccggtcattgccaggctcagcgccgccgggacaacgctcgccaggccatcgtcgagactccagtcgacgttctggtcgcccgcccacatcatggtggagtatttctggctaccggtagaaccggcgcgcataaagaaaaggatctcgccgagcttgcccgtttcttcaagggcttcgtagttacacttcgcccacagcgcaggccaggcgttatgcataatttcggcactgacgccgttatgcaagtacgtgtcggtgggcagatactcgccgaagtcagccatccagccgccgcagccgagttcaatcatgttctttttgatcacttccttgaaccaggcgtaggcttctggattagtgagatcgacaacgccgccgtaaaactcgccaaactccaccagatagtcaccgccagaggcatcttttgccagatagccgtgttgtgccgcttcttcgcagagatctttatcgctggcaacatacgggttgatataggccaggaactgcacgccctcctgattccactgcttaatgcgactatccagttgcgggtagttttcgctgttccacttccagttccacatcacgcgtttgccaaaagaggtcatacgaataccggaccagtcctgcgcccagatgccgttgaccttcacgcccgcgttacgcatggtgtccagtttcttctggcacacttccgtcccgccctgaatgccgagcgttactccgtcataaatccagtcgggcagttctggctggcgtcccagcagggcggttaatttttccagcagggaaatgtatgtgtcagcacattcaaaacgcagcgttgctttgtcttcccacagcgccagttcatggtattccggggcactaaagtcgaagttcatatagcaactgttatcaacatggcagtaatacttctgcgtgctgacaaacgtaggctgtgggaagaaagtccagtaatagtcgccgcccgcattttctttgcagtcggcctgccaggtgacataggtttgtttgttgcgaccaacgccttgttcactggtccatagcgggaacggtttgccacgcagatcgaagtaggaaaactgttcgccgcagccgtagatatggtcctctggttgagcggcaaggcgcagccagatacggttgtggttaaggttgtcgttttgtagttccagcaataaacgcccctgatcgtcggcagagatattcagcgtggcgctaatgtcagaaccacggctgaaatgaattaaccaaccatccggactctggctgacgatggcgtcggtaagcgcaattttctcctgtagtttatctttaatgctgaaattaccgcggaacatatcgatatccgctataccactgccaatccataaacaaggattatctttgctatgggttaaaataagacgttgttgaaaatgtagggtaaaactgtcgttattctgatgaaattgaaaatctaataactgtggacgtggcgtatccataactaatctccatagagttgagaacgagattgttgccttcctgttattacaggcttatgtaaaatgattctcataaaactgatatataaaaactttacagaagctgagctgtttttaacttaataaattgaagatacataatgttgcctttagcgagtgaaatgttcttcaatgattttgactgctaatcaatacaagttattttctctgtccgtaaatattaaaaaacaggcggtgcggttttccactttccagtaataataagtcgataccactattaaaggcgttaggcgggcaactcataggttcaactgccagtccctgacgctgtaatttttcaccgctataaacctgcacccagagttgatcggaacaaaggcttacgctaagcgcctgctgtggatgggtaatggtcatttcccacaaatcattagcggttttaaaggtgtggtcgatttttgtcgcggctatttttttcgcctgcgtgaaatttaaatccagctcatcaacgtggtgaagcgttgtcggattcgcgtgctcatcgacggcataaacctggtttgccggaagctggaacagatattcatcaacagatgttaagttgcaggttaaataaggatgaatacccacgccataaggcgctgcgacagtgccgatattctggcttgcgatctcaacggaaagacccgtgtgtgcgttgaggctataaacaacttgactagccagcataaacggatagccgtaactgggcggcagaaaagctgtcagggtaacgctggtggcggttaattcactaatttgccagtctcgccaggcaagcagcccgtgaatagcggctttactactatgttcattaatgggtaactgatattcctgcccctgatagcggtaacagccgttggcgatccggttcggccacggaataagcactttacccagatgcgccagcggcatctcttcgggtttgtgcgggatgactaaatgacaaccctgaaaggttaattcagccagaccagcaccgacggtcacaatggtcgcgtgataatcccccgcggcaagactaacggtctgtccactgcaatgcatattggtgatttgcatacaaggcaccttaattaagctcatacagcctcccgtgaggctgatgtcaaacccaaaaactgcaccggacggtcccctcgcccctttggggagagggttagggagaggggaaaacccgcaccctattttcagatcagttatttcgcattaatatccagcagacccgctgcaaccgctggagccatgccgggcgctaacgggatacgcgggatcaccaggcaatgcagcaggtgataaatatcctgtttgccgtcccagactttggtggtgaccttattgtccgcatccagctcctgccaccaggaaccattttcatagtccatcaggtacttaatgcagtactcccaccatgtttgataccaggtttcatactggcgatcgccagtgacggtgtagagcgcgtaggccgtacccattgcttcgacgataggccaacgtacacgttcgcggaccaccggttttccttcccagtcaacggtataaacaatcccgtccgcgccatcgggtgcccaggcatcgcgcacggtggcgttaaacagacctttggcatcttctagcagccatgctggtggttgttcgcaacgggcttccagggcagcatggatgtgcagcattaaacggccccattcgatccagtggcctggtgtacctccgaacgcgcggaagcgatgcgccgggttatctttgttgtaatccggcagcggattccactgggtatcgaagtgttcgttaacgcgataatgattatttctggcgacgtcgtggataatcacggaagccacgcgaatcgcgcgatccagccattttttgtcgtgagtgacgtcataaacaatcaagaaagcttccaccgcgtgcatattggcattgccgccgcggtactcttcggttttgctgaaggcttcgtcccaggattccaggcacatctgctcttcttcgctccagaaatatttctcgataatttcaatggtgtaatcgagcagcttgcgcgcttccgggtgacccgttgtgacggcgctggcggcacccagcagagcaaagaagtgttgatagccctgtttggaggcatccaccacgccctcgtcattcacgcaggcataccagccgccatattttttatcacgcagtgcgccgttcatggctttgataccgtgatcaaccaagctgtaagcgccaggtcgacccatcgccgcagcaacggaataaacgtgcaacatacgagcggtgatccacagatgggtgcccatctcttctttgatttgccctttattgcctaaccagccaaaaccagtcggcactacggaatttttaccaaaatcaaagatgcggtcggtttcctgttccagccaacggttgtggcttagggtgttaaaccatttcattccttttatcctcatcttagcggcgtttagccatcatttcgtcgacgatatcgccaagttgttgtaatttcggtgcgcaaacgtcacgcagcatcagctcgttgtctggtaaaccgacgacgcttgcccagactgcacggcctgccaggaatccgcttgcgcccgccgtcattgccacgcgtacggcacgcgggaacagtttttcgtcgacaccggaagagaggatcacccatggcatattgatatggtcattcagacgttgactagcacagagaagctcttgttgcggacctttgccataaagcggcatttcaactttgtagaggtcagcgccactgtcgcccagctctttggcggcatcgatgatcgcttgttcgcgatcgaatttatcgccacgacgcggtgggcggacgactggctcaatgatgcttaccagaccgtgactgtggcacagttcgttgaactctttcaccatatccagacgttgctgcgcatcttcatcactacgccacagcaccagcagttttaaggctttgccaccgtcttgtttgatctgtagcggattgattttgcggtcaataaccacgctatcgaccggaataccgttgccaggaatgaactcatcggcggcgacaatcatggcgcaacttttggcaatcgcgttttgctcaaccacctggcggtagcagaattgttgatctaccagaatcgcgctggcataagggctgagggcctttgcagcgttaactttgaaatcagttaaaacgctatcggctaccggagcgggtgccccagccgcggcaaacatcatgcgcatggcttcgcgctgatcgaccgccagcatggcaaaaccgccgcttgcgcgcgtaatgtcgttgatggtgtacttattcattcatttattcctttatccagtcgttacatttttactttggcagtcatcccggcactgacacggacctgttccagaatggcggaccagtcctggcgaccgcgacccgctgcgcgcgcctggctataaacctcccgactggcggcccccagcggcattggcacatgcagctggttggcgacatcaagggcgatgccaagatccttatgggcaagatcgatcatgaaggcgggagaaagatctccgctgaggactttgtttggccaggaagtggtgaagtgacctttaccggcggcggtaccgctcatcactttgacggcaacatcgaagggaagattcagggcttcgcacaaaacggcggcttctgcgctaagcgcattgagcgcgatgctcatgtagttgttgatgagcttaacgcggatccccatgcccggaccgccagcgttgatcaactcactgcccatcgccatcaggatcggtgtggcacgttcaacttgttcagcggtgccgccagccagcagtaacagagtaccggtaatggcatttgcagaagtacggcctaccggaacatccatcatgctgaagcctttggcttgcatatcggcaatcaatttatcggtttgcagcggatggatggtggacatatcaatgaccagcgcatcggtagataagccttcgcaaacgccgttttcaccgaacaacacgttgcgcaccagatcgccattcggcaacatggtaatgataaattcggcatctttagcggcctgcgccgggttggcggcgggagtcgcacctttgtctaccagatgccgcacagcttcggcgttcacatcaaagacgcgaagttgatgcccttgctgcaataaattgctcgccattgggctacccatttgtcctaaaccgataaacgcgattgctgccataaccctctcctgaatacagttatgtcactttttgtcatttatgacatgctttgcttgtctgtttttgatcgtatttgtaatttatcgtcaaaaaattgacagccgtcactttttaaacaattggtgaaattaaaatgaacgcatcccaaaatgtttaaggaatgaccatgattcgtgttgcttgtgtaggtataaccgtgatggatcgcatctattacgtggaagggttaccgacggagagcggtaaatacgtggcgagaaattatacggaagttggtggcgggccagcggcgacggcagcggttgcggcggcaaggctgggggcgcaggtcgattttattggtcgcgtaggtgatgacgacacgggcaacagcctgctggcagagctggaatcctggggcgttaacacccgttacaccaaacggtataaccaggcgaaatctagccaatccgccatcatggtggataccaaaggcgagcggataatcattaactaccccagcccggatctgctgcctgacgcagagtggttggaggaaattgatttctctcagtgggatgttgtgctggcagatgtacgctggcacgacggcgctaaaaaagccttcaccctggcccgtcaggcgggtgtgatgaccgttctggacggggacattacgccgcaggatatcagtgagctggtggcattaagcgatcacgcggcctttagtgaaccgggtctggcgcgcttaacgggcgtgaaagagatggccagtgcgctaaaacaggcacaaacgctcacaaatggtcatgtctatgtgacccagggtagcgcaggctgcgactggctggaaaatggtgggcgtcagcatcaaccggccttcaaagttgatgtggtagataccacaggtgcgggtgatgtttttcacggcgctttggcggtggcgctggcaacaagtggggatttagcggagagtgtccgcttcgccagcggtgtagcggcgttaaaatgcacacgtcccggtggacgagccgggatccctgactgtgatcaaacccgatcttttttgagtctttttgtataaaatgccagggtgatggtttttcgaggaattttcatgagccttaccgaactaaccggtaacccgcggcacgaccaactcctcatgctgatcgccgagcgtgggtatatgaatattgatgagctggcaaatctgctggatgtctccacgcagacggtccgccgggatattcgtaaattaagcgagcaaggcctgattacgcgccatcacggtggcgcgggtcgggcttccagcgtcgttaatacggcgttcgagcagcgtgaggttagccaaaccgaggaaaaaaaagcgattgccgaagcggtggcagactatattcctgatggtagtacaatatttatcaccattggtacgactgttgagcatgttgcccgggcgttacttaaccataatcatttgcggataatcaccaacagcctgcgtgtggcgcatattctttaccacaacccgcgctttgaagtgatggtgcccggcggtacgttgcgctctcataatagcgggatcattggccctagtgcggcgtcctttgtggctgattttcgtgctgattatctggtaacaagcgttggggcgattgagagcgatggcgcgttgatggagtttgatgtaaacgaagctaacgtggtgaaaacgatgatggcgcacgcgagaaatattctgctggtcgccgatcacactaagtatcatgctagcgcggcggttgaaattggtaacgtggcacaggtcactgcgctctttaccgacgagctgccgcccgctgcgctaaaaagtcgcttacaagacagccaaattgaaatcattcttccccaggaagacgcgtaaatttttgtgaccgttaacctggcttcataccttgccacatagccaaacccatcctttcccgctacagttaatttcttgtggcgcgaaaggaggcaaaaatgctctatatctttgatttaggtaatgtgattgtcgatatcgactttaaccgtgtgctgggagcctggagcgatttaacgcgtattccgctggcaagccttaagaagagttttcatatgggggaggcgtttcatcagcatgagcgtggggaaattagcgacgaagcgttcgcagaggcgctgtgtcatgagatggctctaccgctaagctacgagcagttctctcacggctggcaggcggtgtttgttgcgctgcgcccggaagtgatcgccatcatgcataaactgcgtgagcaggggcatcgcgtggtggtgctttccaataccaaccgcctgcataccaccttctggccggaagaatacccggaaattcgtgatgctgctgaccatatctatctgagccaagatctggggatgcgcaaacctgaagcacgaatttaccagcatgttttgcaggcggaaggttttagtcccagcgatacggtctttttcgacgataacgccgataatatagaaggagccaatcagctgggcattaccagtattctggtgaaagataaaaccaccatcccggactatttcgcgaaggtgttatgctaaaaaccattcaggacaaagccaggcaccgtacccgtccactatgggcctggctaaaactactctggcaacgcattgatgaggacaacatgacaaccctggcaggtaaccttgcctatgtgagcttgctcagtttagtgccgctggttgccgttgtttttgcgcttttcgccgcttttcccatgttttccgacgtcagcattcagttacgtcactttatttttgccaactttctgcctgctactggcgatgttattcagcggtatatcgaacaatttgttgccaattccaacaagatgaccgccgttggggcgtgcgggctgatcgtcaccgcgttattgttgatgtactccatcgatagcgcgttgaataccatctggcgcagtaaacgagcgcgaccaaaaatttacagcttcgccgtgtactggatgattttaacgctggggccgctgctggcaggggccagtctggcgatcagttcctatttgctctccctgcgctgggcgagcgatctcaatactgtcatcgacaacgtgctgcgtatttttccgttgctgttgagctggatctccttctggttgctgtacagcattgttcctaccatccgcgtacctaaccgcgacgcgattgtcggcgcgtttgtcgccgcactcctgttcgaagcaggaaagaaaggtttcgcgctttatatcaccatgttcccgagttatcagctcatttatggtgtgctggcggtgatccccattctctttgtttgggtctactggacatggtgtatcgtcttgcttggcgcggaaattactgtcactctcggggaataccgcaaactaaaacaagcagctgaacaagaagaagacgacgaaccatgattgcattaattcaacgcgtaacccgtgccagcgtcaccgtggagggagaagtgacgggcgaaattggcgcgggacttttggtgttattgggtgtcgaaaaggatgacgacgaacagaaagcaaaccgtctgtgcgagcgtgtgctcggctaccgcatctttagcgatgccgaaggcaagatgaatctcaacgtgcaacaggcgggcggcagtgtgctggtggtttcccagtttaccctcgccgcagataccgaacgggggatgcgcccaagtttctccaaaggtgcaagtccggatcgcgcagaggcgttatatgactatttcgtcgaacgctgccgtcagcaagagatgaacacgcaaacaggacgcttcgctgcggatatgcaggtaagcctggtcaatgatggccccgtgacattctggttgcaggtatgagccagcttccagggttgagtcgggaaacaagagagagtatcgctatgtatcaccttcgggttccacaaacagaagaagaattagagcgttactatcagtttcgctgggaaatgttgcgtaagcccctgcatcaaccaaaaggtagcgaacgcgacgcgtgggatgcgatggcgcatcaccagatggtcgtcgacgagcagggtaatctggtggcggtaggccgactgtatattaatgccgacaatgaagcgtccattcgctttatggccgttcatcccgacgtgcaggacaaagggttaggcacgctgatggcgatgaccctggagagcgtggcgcgtcaggaaggcgttaagcgcgtgacctgtagcgcccgtgaagacgcggtggagtttttcgccaagctggggtttgttaatcagggagaaatcaccacgccaaccaccacgccgattcgccattttttgatgattaagcccgtcgccactctggatgacattctgcatcgcggcgactggtgcgcgcagctgcaacaggcgtggtacgaacatatcccgcttagtgaaaaaatgggcgtgcgcattcagcaatataccgggcaaaaatttatcactaccatgccagaaaccggcaatcagaatccgcaccatacgctgtttgccgggagtttattcagtctggcgacgctcactggttggggacttatctggctgatgctgcgtgaacgccacctcggcggaacgattattcttgcggatgcgcatatccgctacagcaagccgattagcggtaaacctcatgcggtagccgacctcggtgccttaagcggcgatctcgaccgtctggcgcgcggacgaaaagcacgggtgcagatgcaggtcgaaatctttggcgacgagacgccgggtgcagtgtttgaaggcacgtatatcgttctgcccgcgaagccatttggcccgtatgaagagggcgggaacgaagaagagtaactgatggagaggggcggtgctgcctctctcattcaggtcatttatattagtccttggctatttcggttatattaaataagaactctataaatttttattcttcgttggctccatacgtgtcttgctacatcactgttcaggagcatttaaatattatttgtagaactgagtggcaattatcgcagataatgcttaattcatcatcttagttcatgtttgagcgatttttgatagtcaaaaccccctctggtgccatacttttctcataaatatttttaaaatctatagctaacaaatattatgcaaagataatggactagcatcattgtcagtatcattcatttactgctctgtatgttatgaataattatgttgtatgtttgctcttaaaccgtgggaaggaggctataatggttgccaatattaatctcattaaacaagaaagttattctgttgttaatttagaaaaacaactttcccgaactgttaccaacaaaattataacgatgagcaagtaaagaccggttggtggcagtactgaccggtctgtgatgaaagattaatttcaccttaaatcctggtgctgttaggatgctgacgtttttcggctacaccattcagattatgcaaataaatatctctgaatataatatattcatagcacccataattcatcctgggcgataactaaaccatttttgagtaataaatgaaacaactgcaacactcttattatttctggaaaacgcctcgcaaaaacaaaacaacatgcaaaaatccgctttttttaaatgattttccggcgtaattttcgcacatacattaatgagtaatatatgtaaggtattggtaatggcgatgaatacggtttttcttcatttaagtgaagaggcaattaaacggctgaacaagcttcggggctggcgtaaggttagtcgatctgcaattttacgcgaagcggtagagcaatatctggaacgtcagcaattcccggtgcgtaaagcaaagggaggcaggcaaaagggggaggtagttggtgttgatgatcagtgtaaggagcataaggaatgacaaaaatttttcattcttgaatataaaaaacagatgcccttattctggtattaatacaaggctgttttacttgaacttataataactgcaactgttacatcatatctggaaaacgcctcgcaaaaataaaaaatgatgcgtaaatgagctttctttaaagattcggcaagggtacttttctctccatagattcaaaaatgatattggcgagatatttatgaactctctggcaggtatagatatgggcagaattttactcgatttaagcaatgaggtgattaagcaacttgatgatctcgaggtgcagcgtaatcttcctcgtgcggacctattaagggaagcggtagatcaatacctgataaatcaaagccaaacagcaagaaccagtgttcctggcatctggcaagggtgtgaggaagatggtgtcgaatatcagcgtaagctgcgcgaggaatggtaatgggaaaaaatgatgtcaatcagattgctgacaacgtgcgcgttgttcatgccggatgcggcgtgaacgccttatccggcctacaaagtcgtataaattcaatgtattgcagtttattggtaggcctgataagcgcagcgcatcaggcaatcttacgcttgtcatcagtctcatgcccataaccttattgatgtggtggtgggtaaattgaggccaaaccggcactggcggcatagcttgaggtggtaacgcggaatacgagagatggtgtcgtcacaccctatgagctgtaatccgggcgacctgcgccacccggaaaacgtcagagattactctccttcacccggaaacaggaacgggttgatggaactgcgggcatagccttcttgctccattcgtgcgtccagtaccagagaggcgaggtcatctgctacggcttcgatttttggatctttttcctgatagagaattttcaggtaagtgtcgcagtcatcgcagctttcggctttaatcgcggcctgttcgtcatccaggctccagtaatgcagtttgccgctctgctcgcagttgctgcattttacgcgcactacgtgccattcagtttcacacaggttgcagtgcaggtaacgtagcccctgagtggtgccaatttgcaccatgctggacaccggcatagaaccacaaaccgggcaatattgacgttgctcgccgtattcagcgcgggctttgccggggatcagattggccatctgcgcccagtagaggctcagtgcagcccagataaacggcgctttatcgctgctgacggagctgaaatcagaggcaaacagcgcgctggccatatcttccagctcctgagtgcttgccttctccagattctcaatcactgccagcgccgggccgctcatttcaggtttcagctcagcaatcagcgccatcagcagcttttgccagtgcttatcacgcggcagaacgtgaatatccagcgggggcttgccttgtgcgctggcttctttaatgcgcgcagtcagatccatctccagcggatggtcgtacagcaccacttcctgggcgtgggcgataagcgcagcaaagcgcaggtaatcacccagaggattattttctgccagctcgcgcagacgctcggcgcggcggttgtataaattcttgagccgagggaacaataacggcggaatcatatccgccgtacgtttctcgctactacccagctcatcttgcgggattatgcgaatactcattcagctttcttttccgttgtcttgcggacctcacggtaccagcgcgggtgatgtttcttcgcccaggcgctggtaacccatccttccaccatggcggtaatcgtgcctttcacccaaagggcggcgtagatatgcaccatgataaccacaattaacgccactgcggcaaaactatgcagcattaacgcgaatcggatcaccgggatactgaaagcaggcgcaaaataaggacgccagataatcacgccgctcaccagcagcagaaccaggaaaataatcgccgcccagaaaacgcatttctgaccgaagttataacgcccggtgtcacctacttcctcgttgacgacgatcttacgaatattcttcgcccaaaagatatcatcccgattgattaggttgtgatgccagtaacggaaaaacatgatgatgaagctggcaaacataaccacgccgacaaacgggtgcagaattcgcgccagctgcggtgtgcccatgatttgcatcaaccagttgaaggacgggaacaaaaagcccagcccgctcaccgccgccaggatgaagcagaaggcggtgatccagtggttgatacgttccggcgcggtgtagcgcacgatggtgtcacgtcgtttcatttgcgctcctcgtctttctcttcgtgcagattattctcttcctcatccgcacggttcggaccgacacccacgtagtggaagatactggccgcaaaggtagccgcaaagccaacagccgcgagcggtttccagatgcctttccagaatttcacggtttcgctgatttccgggttctccggcaagccatgatacagatttggcttgtcagcatggtgcagcacgtacatgacgtgtgtaccaccgacgcctgccggatcgtacagacccgcattgtcgtaaccgcgggttttcagctcagcaacgcgctcgctcgccagcgttttcatgctctctttcgtaccgaagtgaatcgcgcccgttgggcaggtcttcacgcaggctggttcttgcccaaccaccacgcggtcaacgcacagcgtacatttgtagacgcggttgtcttccgggttgaggcgcggaatgtcgaacggacagcccgcaatgcaataaccgcagccaatgcactgctcggactggaagtcgacgataccgttggcatactgaataattgcaccttccgccgggcacgctttcaggcagcctggatcggaacagtgcatacagccgtctttgcggatcagccattccagtttgtcgttctgctccacttcgctgaagcgcattaccgtccagcttttggcgcttaaatcattggggttgtcgtacaccccaatgttattgccgacggtatcgcgaatgtcgttccactcactacacgccacctgacaggctttacagccgatacaggtggtaacgtcgatgagtttcgccacttcttcctggaagtcccgcgcctgaggcgcgggggtcagaccgttagtcgcggaacgacgaatgatatcttgagattgataagccatatgtcgtctccgttacaccttttccacattcacaaggaaggacttaaactccggcgtctgcgtgttcgcatcaccaacgaatggcgttaaagtattggcaataaagccttttttagctacgccttcatagccccagtgaatcggaataccgatggtatcgatatctttgccgttcgctttcagcgtgcgaatacgtttggtcaccaccgctttggctttgatatagccacggttggaggagactttcacggtatcgccctgggcaatgccaagtttattcgccaggctctccccgatttccacaaactgctctggctgcaaaatcgcgttcaacagcgcgtgtttggtccagtagtggaagtgctcggtcagacgataggtggttccgacatacgggaacttatcggctttacccaatgcttcggcgtcgtctttaaagatacgtgcagccgggttgctgataacgtttggatgcagcgggttagttcccagcggcgtttcaaacggctcgtagtgttccgggaacggaccttccgccatcttatcgagggcaaacagacgccccatgccttcctgctgcatgataaacggcccgacgccgctacccggaggcgctgcgctgtagtccggaatatcccagccggtccacttagtgccgtcccatttcagcaactgacgcttcggatcccacgggttaccctgcggatctgcggaggcgcggttatacagaatgcggcggttaagcggccatgcccatgcccagcccagcgtgttaccgaggccagacggatcggcgttatcacggcgtgccatctggttgccttccggcgtccagctaccggcgaaaatccagcagccacaggaggttgtaccgtcatcgcgcaattgggcgaagctactaagttgttggcctttcttgacgataaccgcaccggttgccggatcggtaatatcggccagcgccttaccgttgctctccatcgccacttcttcactagatggctcatgcggaatggcgtagttccatgtcatgttcagcacctggtccgggttcgcgccaccctgttcggcatacatcttgcgcaagcgcaggaagataccggagaggatctcgccgtcagtcagcgcaatccccggggcgtccgcacctttccagtgccactgtaaccagcgaccactgttaacgatagaaccgttctcttccgcgaagcaggtgcttggcagacggaacacttcggtctggatcttgctgctgtcaacttcgttcagctcaccgtggttctgccagaagttagaggtttcagtgttcagtgggtcgatggtgacgaggaacttcagtttgctcagacaaccgatcactttgtttttgttcgggaaactggcaacagggttaaagccctggcagatatagccattgaccttgccctctttcatcatctcgaagtattgcaggacgtcgtagcctttatcccacttcggcaaccagtcaaagccccagctattttccgccgtcgctttatcaccaaagaaggccttcatcatagagacgaagaatttcgggtagttgccccagtagtttacctggccttccagcagcggttttggcgtgttggcggtaaggtaggtttgcagatcggtctgcttctcgcttggcagcgtcatgtaacctggcaggctctggctcagcagccccaggtccgtcagcccctgaatattggagtgaccgcgcagggcgttaacgccgccgcctgccatccccatattgccgagcagcagctggatcatcgccatcgtacgaatgttttgcgcaccaacggagtgttgcgtccagccgagggcatacaggaagctggcagttttatcgtgagcactggtttctgcgatgtattcgcagactttcaggaacgcgtcttttggcgtaccacagatgttttcaaccacatctggcgtgtagcgggaaacgtgctgtttcagcaagttccacacgcagcgcggatgttgcagcgtggtatcgcgtttggcgaagccgttttcgtccagttcataagtccaggaggatttatcgtacttgcgtttttccgcgtcgtagccggtgaacaggccatcttcaaagccgtaatcctcacgcacgatcaggctggcgttggtataggcttcggtgtattcgcggttgaatttttcattgttcagcaggtacagcaatacgccactcaggaaagcaatgtcagtaccggaacgaataggggcatagtagtcagctaccgccgccgtacgcgtaaagcgaggatcgatcacaatcagcttcgcgccgttgtgaattttggcttccatcgcccagcggaacccgaccgggtgagcttcagcggcgttaccgcccatcaccacgacgaggttggcgttcttgatgtcgacccagtggttggtcatcgcaccgcgaccaaatgttggagcaagacttgctaccgttggtccgtgtcagacacgcgcctggttgtcgaccgcgagcatacccagcgcgcgggagaatttttgcgttaaatagccggtttcgttactgctcgcggaagcacacagcatcccggtggagagccagcggttaacagtcacgccttcggcgttttgcgcaatgtagttagcatcgcggtcttctttcatcagtttggcgatgcgatcaaacgcctcttcccaactgatttgctgccatttatcagaacctggcgcacggtattccggaaacttcagacggctttcggagtggatgaaatccaccaggccagcgcctttcggacaaagtgcaccgcggttgaccgggtgatccggatcgccttcgatatggaagatagatgctttggcgttttttgctccgtcaccgaggctgtacatcaacagcccacagcctacggaacaataggtgcaggtattacgggtttcgcgggtgcgcagcagtttatactgccgggtttccgcgagtgctacgctgggtgcaaaacccagtgccgctgccgtggtgcctgccataccgccagcgcagatcttaaagaactgccttctgctgacctgcatggattgctccttgtttcgacattgtcacgtcccatttacattcgcttgctgcgtgtgcagggagtgggagttatttttctttgcggaaggggccgcaaaggtccagaattggctcaatttccctccatccaggaagggtttgtaacagaataccataatgttggtgtgtgtgttcttatctggttaagagaaagtgaaaaaaacacagcgaaaagaaatcgaaaatgtgacaaatatcacaggtgttcgtcaaattgagttatggcggcgtgatgatttacaacacccacggttagatgaggtcgcggaagaagttcccgttgcgctggtctacaacggcattagccatgtggtgatgatggcgagccccaaagaccttgagtactttgcgctcggttttagcctttccgaggggattatcgaaagtccgcgcgatatcttcggcatggatgtcgttccttcctgtaatggtcttgaagtacaaattgagctttccagccgccgctttatggggttgaaggagcgccgccgggcgctggcgggacgtacgggctgtggcgtatgcggcgtggagcaacttaatgacatcggaaaaccggtgcagccgctaccgttcacccagacgtttgatctcaacaaactggatgatgcattacgtcatctcaacgattttcagccagtggggcaactgactggttgtactcacgccgctgcctggatgttgccatctggcgaactggtcggcgggcatgaagacgtgggtcgccatgtggcgctggacaaactgttaggccgccggagtcaagaaggggaaagctggcagcaaggtgcggtactggtttccagtcgtgccagttatgaaatggtgcaaaagagcgcgatgtgcggcgtagagattttgtttgcggtgtctgccgcgaccacgcttgctgtagaagtggctgagcgctgtaatctgacactggtaggtttttgtaaaccgggtcgggcaacggtttatacccatccgcagcgtttgagcaattaattaaaataagtcctgcgaaatatattaaattgcaggacttattcatttcgtgaattttattattttatttataaacaaaatgcgtgtagtggcgttttcttttttcatttattatgttcactctcttatctatatatttataaggcaattaaatgaaaaggaatttattatcttccgctattatagtcgccatcatgtccctcggtctgacgggttgtgatgataaaaaagccgaaacagaaacgctcccgcctgccaatagtcaacctgccgcaccagctcctgaagcgaaacctactgaagctcccgttgcaaaagcagaagctaaacctgaaacacctgcgcaaccggtggtcgatgaacaagcggttttcgacgaaaaaatggatgtctatatcaagtgctacaacaagttacagatcccggtacagcgcagtctggcgcgttatgctgactggctgaaagattttaaacaggggcctaccggtgaagagcgtactgtttatggcatctacggcattagtgaatccaacctcgctgagtgtgaaaaaggcgtaaaaagtgctgtggcgttaacgcctgcgctgcaaccaattgatggcgtggcggtgagttatatcgatgctgccgtggcgttgggtaataccattaacgaaatggataaatattacacccaggaaaattataaagacgatgcgtttgcgaaagggaaaacgctgcaccagacattcttaaaaaatctggaagcctttgaacctgtagccgaatcttatcatgcggcgattcaggaaattaatgataagcgtcagcttgcggaactgaaaaatattgaagaaagagaagggaaaacattccactactactctctggcagtcatgattagtgcgaaacaaattaataacctgataagccaagataagtttgatgcagaagcggcaatgaagaaagtgtctgaactggaaacgctagtggcgcaggccaaagaagcggataaaggcggcatgaatttcagctttattaatagcgcaggccagtatcaactcgaggctaaaaaatacgttcgccgcatcagagataaagtcccgtactctgactgggataaagagcaacttcaggacgcaaacagtagctggatggtcgaagactctttcccgagagcattacgcgagtacaacgaaatggttgatgactataatagcctgcgttaaacgtttttgatgataaatgcagtgtcggatgcggcgcatccgacacagttcaccccttgtgaagtaactccataaatgcctcatatcctgttaacccggcaataatctccgccggatgctgacacaatatgcttgccagatagctaaatatttttagctcatgacgcgcatcggcggcggcgcaggcgatcaagacatggttaatgacttcgttattcacctcaactggttgggcgagggtaataaaaaatccacgaaaacgtcgctcctgttcgctccagcaatgtgggatggcgaggcgattaacaatcaggttttcaccttcgccttcgcgggcgatgatgcgttgtgcttcatcggcggtaatatggtgttgtgcgactaattgcgcacaaatttgccgggtaatatgttgccagctttcaccgcgtacattgctataatgaaaacttccgggggcagagaaaaaacgctccggctgttggcgaataaatgccgtcgccagaaaatgttttatttgttcgataccggcagccgtaatgatattttttacggtgatgtaattatttaccgcgtcatccagtaaataatggctgttgttaatgatcaataacggctcaatctcttcgcgaatggcaacaagttcgcttaagctacgggcaataattacccgacaatttaaaacatcgcgctcaatggcgagctgattaatagtggcaatcgcgttctggtcgctgagcaaaatgatcggctggcgttcgttttgatgccgctccagcgcacaggcaaaatacaaaccgatcagatcgctgtcgaaaaggggaatatcgagctgttcacgcagtagcgtaataaagtgcagactcatatcaaaggccgcaggccaggcggctttcaggttattcatgctgctctggcggtgctcagcaatccacactggtgcggcaaggcaacgtaataaatgcccggtaatattctcaaccagctgcgcatcaataatattcaaactcgcgatgcccggcaccctttgcagcaacccctgcacattatcggcactaattacctgcgcttgctgatgctgtttctctatcaaacccgtcagggttcttacagcgttatcaccaagaaacagaccgctatgttcaacgatttgttttatctcgtcaccgggatattgcggccactcatcggtcagttgattacgcagggcgtaaatcgccagaatcaggctggagagataatcaccctgcatgagcggccagcggtgttggttgtcgcaggccgtggataaatgctgaaggttgtctcgtgttatgcccgccagcggaattaaaaacggatctttgcgcagcaagttcgccagcaagataacgcgtttctcttctgtctcatcaatgaaatggcccaaaccagggcggctggccaggcaacaagtgcgttcataacgctgttttaaccggggcagacgctctgctacccacgtttctggcaaattaagcgcgctggcgagttgcgcacggggagtgaaagtattcagtaataacagcgccagcagccgatcgtcgttatcgtgcttttgcagcaactgaaaaaagctgcggcgctcgaagatttccagctgatagcccgcactgccactggcgaaaatgcgggctttgccgttaagggtgaagttgagatagtcaatatcacgcaggatggtcctgccactaacgccagtctgttgcgccagctcgccaggcgtgcgcggctgttgctccagcagatcgacaatctttaactggcgttcgtttagcattaatccacctgacggaactggctaaacgcgttgactttctccgcagttaaggtcgtcagaaaaccccgtatcagcgtgagcagagcttcgtaatcggctttactaatcataccgctgttggcgtgcagataacgagttggcagacacagcgcgacaaccggacgcccgccgcccatcacgttgtagcgcccgccatccgtcgcaccggttttcatggtggaaaattgcagcggtaaatcgttatgtgcggcacagctttttaacgctgctaccagtttctggttggggaagtagcgcttgtcaaacagcatcagccccggcccctggcccagtttcagcgggtatttaatgttatcaatgcccggaacatcgcccgctacggcggtatccaacacgatcacgacgtccggtttaatgtgttccgcgctggtttgcgccccgcgtagcccaacttcttcttccacactgccaacgccatacagcgtaatttcgggattattcaccgtctgcaatagttcagccatcattgcgcagccgatgcggttatccaacgccttgccgaccactttatcttcgccccagcaggcaaaattggcttccgggctaataaaattaccaatttccacgccgcgcttttccacctcttcgcgactgttcgcgccaatatcaatgaacatctcatcaaaactcagcggttgttgcttttgcttttccgttaacgcatgaggcgcgacggaaccaatcacaccagggattttcactcccttgtgtgtgcgtatggttacccggtggttgagcatgctctgattccaccagccgccaatggtggtaaaacgcagaaaaccgctctcgtcgatgtgggtgaccataaagccgacttcatccatatgtccgacaacggcaacttttggacctttattccccttacgggcaacaaagctgcccagaccatcgaaggtgatttcattcacgcaaggttccagcgtgtttatcagaatgtcgcgaacttcctgttcatcgccgctgacggcgctggcttcgcacaactgttgcagtaactcaatgttcatggacaagctcctgttgcgcggctttcgctttgcggcgtaaccacaatcctttcaggacgataatgaaactaatgttcagcgcgaggccaatcgccagcaccagataaaagctacccaccgggctcatcaggccgatcagcgggtcaaagatacccaaaccaggtgccagacgtttgattccgaaagcgatcaccagcacgccggtaatgccgcccgccagcgtattggcggtaatcatcggcaacggagctgccagagcgtaaggaatagccggttcggttgcgactgtggcaccgaccacaatggcactactggcagcctctttttcctgtcgggtaaacagtttgggcgcaatgaacgtcgcaagacccgccgcgacgggcggcatcagcgcgacaacgccgacgatggcgtaccagtcataaatgtgtttttccagcagactgaagcagaagaaccaggcggttttattgatggggccgcccatatcgaacgccagcatcgcaccgaccagaaacgctgccgcaaacttcatacttggaggaatggtattcaggaagtggagcagcccgcccatgaggtcggacatcaccggcccgataacgtagtaagtgagcacgccgaaaaccagcagagtaacgaacgggatcagcatactaccgagcagcggttgtaatgctttgccaaggcgcactttgcggaaccagaagacgaaatagccaatcgccagccccagcaccaccgcgccgaggaatcccgcaccgctctgggtgccgagcagcgctttgtcgttcgccagatagcaaaccagaaacgccggagcgaaagccggtttatcggcaatgctgctggcaatataagcgcccatgatggggatcataaaggtgaagccaaggtaaccgatggattcaactacccaggtaaagctcggcgcgcctttgctcatatcggtatacggcaaaccgaactgcaccagcatgttggcaagcgccaccaggataccaccgccgatgacaaacggcagcgccgcagagacgcccgccatcaggtggctcatcacgctaccgctttgcacttcctgtttgccaagcttcacgccgctatctgcggcaaaaagctggctgtttgtcggtaattcgctgaaaatctggtcgatatttttcaacgcctgggagatggcaatctcataaactttcttcccggcaaaccgcgcgcgatcatcaccgctcaggccacgcccggtagcgagaatgacgtaatcggcagcggcaatctcttcgctggataagcggttttcaacgccactggacccttgagtttccacttttatggtatgaccgagagaacgggctttctgttccagggcttccgccaccatgtaggtgtgagcgatcccggcggggcagttggtgatcgcgacaatacgtaaggaactctccatcgccacttccttaactgctgagggtttgatttaacaaggcaagcacctggtcggtatcgccctgttgcagttgatgaataaattccttgtgaataattttgcgacacagtgtgccgatgattttgacctgatcctcttcgccgctttgcggcacgccgaggcagatccagcaattgacgtcttcgccatcgctggctttccagtcaatagcctgcgctttgcgggcgaataatacgaacggttgtttaacgcaggcgcttttaccgtgcggcacggcgacaccggaaccaaatccagtagagtgcattttttcgcgcagcagcagggtttgcaggaactggtgactgtcggtgataaaaccgttttgtaacgctattgtcgccaactgcttcagaacggaataagcgccattgccctgaatattcaggtcaatacagcttgcagtaagagctgccattaatcggactccataaaatatattttaatcaattgtaatggtggagcgattaagtgatgagaggcgatatgtcggtaaacaatgacaatttgagacagagtgaaaggtcagatttgcggagtaatgcacataatggttatttaaataaaccacatgaatcattaatgggttattcattatttttgtgatttactcacaatgtatcagggaaatataacttaccgggagatgtaatatgtttaatttttcaaatcgaaatttaaaatattgtgccggaggcatctctggcacattgggcaattacggcaggtaaaacacttcttgcagctcgctactcaccgggctgttatccgggttagcgggcataacatcggtcatatatttccaccaacgttggcagacatcagtgctggcaaccgcattccagcgttcttcagattcaatctctaccatggcaaacagcagattacgcgctttgtcgagatagatggcgtagttatgcgcaccgtgagatttcagcactgcttccagttctggccagatgggattatgccgacgctgatactcttcgtgggcgtcggggtttacctgcatgacaaaggctttgcggatcatgtttgctccttacagcgccagcgcactggcgagtggcgtaacgccgaaacgcttgccgagcgctatcaactcttcacggctgatggtctgtttcatgccgcccatgctataaaccttcactaatacttgtgcacttttttctgcggtgtcgattaaaccgaaggtttcatccagcgtcggtccgctgccgaagacgccgtggaagggccacaacaccaggctatgtttttgcatctcttgtgcggtcgcctggccgatttcgtccgtgccgggcaccatccacggcaaaatgccaacgccatccgggaataccaccagacactcggtgctgccttcccacagttggcgagtgaagaccgcggtgtcgttttcaagtacataggtgagggcgatcaggttggtggcgtggcagtgcatgatcacccgatctttgccgttggtggctttaatgcgctcgcagtgggaaaggaagtgagccggaagttcggaagtggggacggcttcgttggttaacccccaaagaatgtggtagcccgcgccgtcgctgtcgacttttacgatgcctaagttagccgcaggatcaagctggacgttacggaagaatttgccgctgccggtgacaataaacggtgtatttgccagtaaaggcatgggctggctgagcgggatatagcgcggttgttggtggaaattgtcgtgatatggtgcgatatcggcgtcatccaggcgtagcgtcaggttgccgccgttgcgctcatcccagcctttcagccaggcgtcggtggtggctttgatcattccctggacaaaccaggactgagtaatgttttgcatgttctgtgttcctgtaaattcggtgttgtcggatgcacgacccgtaggccggataaggcgctcgcgccgcatccggcaatcaatgcctgatgcgacgctgtcgcgtcttatcaggcctacaactattgccgacctgtaggcctgataaggcacttgtgccgcatccggcaatcaatgcctgatgcgacgctgtcgcgtcttatcaggcctacaactgttgccgacctgtaggccggataaggcacttgtgccgcatccggcaatcaatgcctgatgcgacgctgtcgcgtcttatcaggcctacaactattgccgacctgtaggccggataaggcacttgtgccgcatccggcaatcaatgcctgatgcgacgctgtcgcgtcttatcaggcctacaactgttgccgacccgtaggccggataaggcgctcgcgccgcatccggcagtgtttacccgcggcgactcaaaatttctttctcataagcccgcacgctctccagccattcgctacctgctggcgtatcgtgacgttggcaatacatttcccagaccgcctgccacggcaagcttttctgctcttccagcagtgccagacgcgcagtgtaatcgcccgccgcttccagcttgcgcagctcagcggtaggttccagcaacgcacgcagcagggcttttttcatattgcgtgtaccaatgacccacgcggcaatgcggttgatagaggcatcgaagaagtcaaggccgatatgcacccggtcaaacagatcgtgacgcacaatctcactggcaattgcctgggtttcatcatccagcagcactacgtgatcgctgtcccagcgaaccggacggctgacgtgcagcagcaactgcggcacatacagcatggcggcggaaatcttgtcggaaatcacttcagtcgggtggaagtgcccggcgtccaggcacagcgcagtctggcggctggtggcataccccatgtaaaactcattggagccaaccgtgtagctctctgcgccaatgccaaacaatttgctctcaacggcgtcgatatggtgcgcagggtttagcttctcgctgatcacctcatccagtgctgccagcagacgctgacgcggggcgagacggtcaacggtgatatctttcataccatccgggatccagatgttcatcacgcttggtgtgccgagttgctcgccaaaataggcgctaacgcgacggctggctttgcagtgatcaatccagaactggcgaatgctgtcgtcggcatgggaaagcgtaaagccatcggcgcttagcggatggctaaagcaggaggggttaaaatccagaccgagctgattggctttcgcccattcaacccagtttttgaagtgctctggtttgatctggtcgcggctgactggcgtatcactttccagatagatggcatgtaaattaagccgtttcggccccggaatcagccgcatagcctgttccagatcggcacgtagctcactggcattacgcgctttgcccggataattgcctgtggcctgaatccccccggtcaggctaccttccgggttttcaaaaccggaaacatcatcgccctgccagcagtgcatactaacgggtaaacgatcaagttggcgcagcgcctcctcgacatcaatccccaccgccgcgaaacgctgtttcgctagctcccaggcctgttccagttgagtggtcatgcgcaaagctcctttgtctgtcgtgtagagtgaatctgcgccacatagtgggcaatttcactgtcaggattaggggtaaaggtggtcagattcgcggtggtgctgacgacctgacggaaatcatccacattgttgagttcatccagcgtcattaactggatgccgatattgccgagcgtgctggcttcaacaggcccggcgatcacccgaataccgcaggcatcggcgcatagctggttgagcagcgtgttctggcagcctccgccgacaatatgcagttggctgaaatcttcaccgcgcagctgcgccagctcatgcaacacatcggcatacagcagcgccagactgtcgaaaatgcagcgcgccagttcagcatcactttccgggatcggttgcgccgtttcccgacacgcagcctgaatttcgctgcacatcgtctcaggattaataaagcgatcgtcattgggattgataatgaagcggcaagccggaagtgcctgtgtcgcggagataagcgccggaagatcgttgatttgctgctcctgaagcactcgctgaagcagccataagcccataatatttttcagcacccgatagcgaccttccgccccgccttcattggtgatgttggctgccagtgccgtgtcattggtaaatggcgtctggctttcgaagcccatcaaactccaggtgccagaagagagataagcagcacgactgccgtttaacgggctggcgataaccgcgctggcggtatcatggctggcaacggcgaccactggaatctcattaccctgcgggcaaatccagtgacctatgacattacccggatgcgtcgggcgaccaaaccaggctttgttggccccgctccacgccagtaggctctcgtcccagtcgtcgctattgatattgaccagttgcgtggtcgtggcgttggtatattcccagttcatcttgccggtcaggcgataactgaagtaatccggcatcagcagagcgtgagcaatgtgtggaataagttcaggttgttgctccgtcagcgcacgcaactgataaagcgtattgaagggcagaaactggatgccgctacgttgataaatatcgcgtttgccgagttgttgttgtgcctgcgccattaggccattggtgcggctatcgcgataagcaacgggcaggcccacacgctgaccctgttggtcgagcagcacaaagtccacgccccaggtatcaatcccaatgctatcgatacgaatcccttcctcgcacaccttgtttaatccaaggcgaatggcactttcaaggctatccacatcccaggtgacatagccgttctgactatgcagcccattgttaaaacgatggatttcgcgcagcgtcaggctgcggcattcacgctcgtaacgcgccagcatcacgcgcccactggatgcgccgagatcgacggcgacacaattgcgaaaggtcataatgtgatcctgctgaatttcattacgaccagtctaaaaagcgcctgaattcgcgaccttctcgttactgacaggaaaatgggccattggcaaccagggaaagatgaacgtgatgatgttcacaatttgctgaattgtggtgatgtgatgctcaccgcatttcctgaaaattcacgctgtatcttgaaaaatcgacgttttttacgtggttttccgtcgaaaatttaaggtaagaacctgacctcgtgattactatttcgccgtgttgacgacatcaggaggccagtatgaccgtattacatagtgtggatttttttccgtctggtaacgcgtccgtggcgatagaaccccggctcccgcaggcggattttcctgaacatcatcatgattttcatgaaattgtgattgtcgaacatggcacgggtattcatgtgtttaatgggcagccctataccatcaccggtggcacggtctgtttcgtacgcgatcatgatcggcatctgtatgaacataccgataatctgtgtctgaccaatgtgctgtatcgcagcccggatcgatttcagtttctcgccgggctgaatcagttgctgccacaagagctggatgggcagtatccgtctcactggcgcgttaaccacagcgtattgcagcaggtgcgacagctggttgcacagatggaacagcaggaaggggaaaatgatttacccagcaccgccagtcgcgagatcttgtttatgcaattactgctcttgctgcgtaaaagcagtttgcaggagaacctggaaaacagcgcaagtcgtctcaacttgcttctggcctggctggaggaccattttgccgatgaggtgaattgggatgccgtggcggatcaattttctcttagtctgcgtacgctacatcggcagcttaagcagcaaacgggactgacgcctcagcgatacctgaaccgcctgcgactgatgaaagcccgacatctgctacgccacagcgaggccagcgttactgacatcgcctatcgctgtggattcagcgacagtaaccactttagcacgctttttcgccgagagtttaactggagtccgcgtgatattcgccagggacgggatggctttctgcaataacgcgaatcttctcaacgtatttgtacgccatattgcgaataatcaacttcgttctctggccgaggtagccacggtggcgcatcagttaaaacttctcaaagatgatttttttgccagcgaccagcaggcagtcgctgtggctgaccgttatccgcaagatgtctttgctgaacatacacatgatttttgtgagctggtgattgtctggcgcggtaatggcctgcatgtactcaacgatcgcccttatcgcattacccgtggcgatctcttttacattcatgctgacgataaacactcctacgcttccgttaacgatctggttttgcagaatattatttattgcccggagcgtctgaagctgaatcttgactggcagggggcgattccgggatttaacgccagcgcagggcaaccacactggcgcttaggtagcatggggatggcgcaggcgcggcaggttatcggtcagcttgagcatgaaagtagtcagcatgtgccgtttgctaacgaaatggctgagttgctgttcgggcagttggtgatgttgctgaatcgccatcgttacaccagtgatagcttgccgccaacatccagcgaaacgttgctggataagctgattacccggctggcggctagcctgaaaagtccctttgcgctggataaattttgtgatgaggcaagctgcagtgagcgcgttttgcgtcagcaatttcgccagcagactggaatgaccatcaatcaatatctgcgacaggtcagagtgtgtcatgcgcaatatcttctccagcatagccgcctgttaatcagtgatattagcaccgaatgtggctttgaagatagtaactattttagcgtggtgtttacccgggaaaccgggatgacgcccagccagtggcgtcatctcaatagccagaaagattaattcgccatgccgatgccgacgatgttagcggcgacaataatcaccacacaaccgaggctcaacaccgttaccggacggcgtcctgcattgttccactctttcagcaccagcccgacgataccgccgcacaatacatagaaactcatatgcagcatccaactgatgtagtcatactgcgccggaatgcgggcgtggccccaggcatagaaaaagaattgcagataccacatcaacccgcccagtgtgctgagtaacacattgtgaatgatcaggctttttgccaggctgaagtcggcttttaggctcaaatccttcacttttgccagacgaataaaacagaaaccgaggttaatgatcgcgccgccgcccatgatgacaacatagcttggcagagcgacatacagtggatcgacgccaagtgcggcagcggcttcatgcatcggttttgcggcgttcatcgcaaaggacatcccggcagagaaaatgccgcacatcaccgccagcaccagcccttttttcagattgaactcttcggctttaatgcccatcttgcgctctttcaactgcccggcgcgagttacaatccctacgccaatcagcgccaccagaacgccgagcaacgtcatgcgtccgccttcggtgctaatcaacacatcgaaattgccgttgataattggcgtcatcagcgtaccgacaatcaacgtaatgccaatggcgatgccaattcccatgctcatgccgagataacgcatggtcaggccgtagttgatattaccgatcccccacatagcgccgaacagaaaaacaggcagtcgcgtagagagactaaagctgctgtaatacgcccagaaattcggtagtaacagggcgctgatggcccacggcagaataatccagctaacaatcccaccgacactccacatggtttcccaactccatttttttacttttttgaacggagcgtaaaaacaggctgcactggccgcgccgatcaaatgccaaaatatccccatcgtaatcgcgttactcatcttcttatcctcatcatttttcgtcgcgtcacatctccgacgagatgagtgtaaaaatcgtgctgtcgattaacctttcgcctgttgccgccgttgtcgatttactggcaatcacggcattaagtgggtgatttgcttcacatctcgggcattttcctgcaaaaccatacccttacgaaaagtacggcattgataatcattttcaatatcatttaattaactataatgaaccaactgcttacgcggcattaacaatcggccgcccgacaatactggagatgaatatgagctataccctgccatccctgccgtatgcttacgatgccctggaaccgcacttcgataagcagaccatggaaatccaccacaccaaacaccatcagacctacgtaaacaacgccaacgcggcgctggaaagcctgccagaatttgccaacctgccggttgaagagctgatcaccaaactggaccagctgccagcagacaagaaaaccgtactgcgcaacaacgctggcggtcacgctaaccacagcctgttctggaaaggtctgaaaaaaggcaccaccctgcagggtgacctgaaagcggctatcgaacgtgacttcggctccgttgataacttcaaagcagaatttgaaaaagcggcagcttcccgctttggttccggctgggcatggctggtgctgaaaggcgataaactggcggtggtttctactgctaaccaggattctccgctgatgggtgaagctatttctggcgcttccggcttcccgattatgggcctggatgtgtgggaacatgcttactacctgaaattccagaaccgccgtccggactacattaaagagttctggaacgtggtgaactgggacgaagcagcggcacgttttgcggcgaaaaaataatcatttgccgcctgctgcaatgaggcgtataggccgcatatcagcttaaaaaatgaaccatcgccaacggcggtggtttttttgtgatcaatttcaaaataaaaacaatgatccgataaaaataaaacagcgtttcaattgatgtggttttgatcacttttattgattaaatgaatgtctatcttcgtttccatcaacactgatgctccattgaggaattacgcatcagcccttaaaaatatgccgacaggtgatggaaatgcagataaaacgcagcattgagaaaatcccgggggggatgatgctcgtcccgctattccttggcgcactgtgccacaccttcagcccgggggcggggaaatattttggaagtttcaccaacgggatgattaccggtacggtgcccattctggcggtgtggtttttttgcatgggggcgagtataaaattaagcgcgacgggaacggtactgcgtaaatccggtacgctggtggtaactaaaattgccgtcgcgtgggtggttgcggcaattgccagccgtattattccggaacatggtgttgaagttggattctttgccggacttagtacgctggcgctggtggcggcgatggatatgaccaatggcggactttacgcttccatcatgcagcagtacggcacaaaagaagaagctggggcatttgtgttgatgagcttggagtccgggccgctcatgacgatgattattctgggcactgccgggattgccagctttgaaccgcatgttttcgtcggcgcagtattaccgttcctggtgggctttgccctggggaaccttgaccctgaattgcgagaatttttcagcaaagcggtgcaaacgctgattccattctttgccttcgcgctgggcaataccattgatttgactgtgattgcccagactggtttgctggggatcctgttgggtgtggcagtaattatcgtgaccggtattccgttgattatcgccgataaattgattggcggtggcgatggcactgccggaattgccgcttccagttccgcaggggccgcggtagcgacacctgtgctgattgcagaaatggtgcctgcgtttaaaccgatggctccggcagcaactagcctggtagcgacggcggtcattgtgactagcattctggtgccaattcttacctctatctggagtcgtaaagtcaaagccagagcagcgaaaatcgaaattttaggtacggtgaaataaacctgcttccttaatccccacagccggatgaactaacgttcgtccggtttgctattgagttcctgcctggatacttaccgcgaaaacagcacgcctgacataaaataaatatggtctaatggggaaatttctcgtggagagggaacagatgcgatatccggttgatgtatacacaggcaagattcaggcttatcccgaaggcaaacccagcgcaattgctaaaatccaggttgatggtgagttgatgctgacggagctggggctggaaggtgacgagcaggcggagaaaaaggttcacggcgggccagacagagcgctgtgtcattatcctcgtgagcattatctctactgggcgcgggaatttccggaacaggcggagttgtttgttgcgcctgcgtttggtgaaaacctcagtaccgacggcctgacggaaagtaatgtttatatgggcgatattttccgctggggagaggcattaattcaggtcagccagccgcgcagcccttgctataaactcaattaccattttgatatcagcgatatagcgcagttgatgcaaaacacaggtaaggtggggtggttgtatagcgtgatagcgccagggaaagtgtctgcggacgcgccgctggagttggtttcccgtgtcagcgatgtgaccgtgcaggaggctgccgccatcgcatggcatatgccgtttgatgacgatcaatatcaccgtttactctccgctgccgggttaagcaaaagctggacgcggacgatgcaaaagcgccgactgagcggcaagatcgaagatttttcccgccggttgtggggaaaataacccccggagtgtaggcctgataagacgctatcagcgtcgcatcaggcatcctgctcaaatgccggatgcggcgtaaacgccttatcctgcctgcaaatgcgaagtttaactccgcttatacagcggcaaccaaatcaccagccgtaaaccgcccagcgggctgtcttctgccttcacccagccacgatgctgctgaatggcggtttcaacaatcgccagccccaaacctgtaccgccagattcacgatcgcgtgcttcatcggtacgatagaacggacggaaaatctgttcgcgatcttccgggctaacgccaggaccatcgtcgtccaccgtaatggtgataccgtctttatctaccgcaaagcccacttcaatcttcgtatgggaataacgcagagcattacgaacaatgttttccagcgcactttccagggcgttcggattgccgtacagcggccacggcccaggcgggaagttaactgtcaagctcttgcccatttgctcggcttcgaacgccgcgttatccagcacttcactccacaactggttggctttgatggtttcgctaaccagcgcgtttttttgctgattacgactcatcaccaacagatcgttgatcatgctgtccagacgttgcgcttcggtttcaatacgctccagttccttgctttcaccgctacgacggcgcagtaacgccgtacccagttgcagacgcgtcagcggggtgcgcagctcgtgagagatatcagaaagcagacgctgctgagaggtcatcatgcgctccagcgcggtgaccatctggttaaaactggcacctgcggcaaggaattcctgtggccccgcttccagttccgggtgctggcgtaagtttccctgggcaacttcatcggcagcgtttttcagcttacgcgccggttttgccagactccaggccaaccacaacagcagcggcgtactgaccaacatggtgacaatcagcagtaatagcgggcggtcaaacagtaagttaatgaaatcggattgagaactgctggccggacgaatcagataaagttggtaattatcttcgccatcacgcacggagaacggaccgaccagttccacgcggccatactttttcttctgcggatgatcggcgttatcggcctgaccaataaagttacgaatgatctgcatttcgctgcgttcagcgccgatcacgcggccttcggtggtcaccaataacaaacgctgtcctggcggtgcccacttatcaatcgcccggaacagacgccgccaccacattaaatcgttgggcggatcgttcgccagctccgcttcgacatgctgctcaatcatcagcccctgacgctgttcgctatccagaagctcggtcatctggcgactatcgagcttgggtaacatcaaaaccaacatcaacaccagcgccagcgtcagccagaagatggcgaagatgcgcgcggttaagctgcctatcatgaagcagaaaccatcagatattagctcaactagcagaaaccatcagatagccgcgaccacgcaaggttttaaaccacgggtgaccatctttacgatccggcagtttacgacgcaggttggaaatgtgcatatcaatagcgcggtcgaaaggcgtcaggcgtttgcccaacacttcctggcttaaatgttcacgggaaaccacctgacccagatgctgtgccagcaaatagagcagggtaaactcagtaccggttaactccagcgtttgcccgtcgaagctggcttcctgacggcctggattcagcactaaggcatcaacttccagtgtcggactaccgttgtcgttgttttgctgttgctcgctccagtggctacggcgcaggatcgcgcgaatacgtgccaccagctcacgatcattaaacggtttcgggagatagtcatctgcgcccagctcaaggccgagaacgcgatcaagttcactgccgcgcgccgtcaacataatgacaggcgtctggtgtgtctggcgaagtgcttttaatgtgtcgataccatttttcttcggcatcattacgtcaagcaaaagtaaatcaatgctgtcgtccagaagatcaagcgcctgttccccatcgtgggcaacaatcacgttgaagccttccatctcgagcagctcctttaatagggaagtcagctctcggtcatcatcaactaacaggattttattcattgtttaaatacctccgaggcagaaattacgtcatcagacgtcgctaatccatgactttacgttgttttacaccccctgacgcatgtttgcagcctgaatcgtaaactctctatcgttgaatcgcgacagaaagattttgggagcaaatgatgcgcatagttaccgctgccgtcatggccagtacgctggcagtcagtagtttaagccacgctgctgaagtcggtagtggcgataactggcatccgggtgaagaacttacgcagcgcagtacgcagagccatatgttcgacggcataagtttaaccgaacatcagcgtcagcagatgcgagatcttatgcaacaggcccggcacgaacagcctcctgttaatgttagcgaactggagacaatgcatcgccttgtcaccgcagaaaattttgatgaaaacgctgtgcgcgcacaggcagaaaaaatggcgaatgagcaaattgctcgtcaggttgagatggcaaaagtccgcaaccaaatgtatcgcctgttaacgccggagcagcaagcggttttaaacgagaaacatcaacaacgaatggagcagttgcgtgacgtgacgcaatggcaaaaaagtagtagcttgaagctattgagtagtagcaacagtcgttcccagtaataaaccctgttttccttgccatagacaccatccctgtcttcccccacatgctgtgggggttttttttatcctcaatttgcctgctgcttaatgcattgcagatgatttgcttccgttatactagcgtcagttgatagcgggagtatttatgaatcaatcttatggacggctggtcagtcgggcggcgattgctgcgacggcgatggctagcctgctattgctgattaaaatttttgcatggtggtataccgggagcgtgagtattctcgccgcgctggtggatagcctggtggatatcggcgcgagcttgacgaatttattggtggtgcgatattccctgcaacctgccgacgataatcacagctttggtcacggtaaagctgagtccctcgcggcgctggcgcaaagtatgtttatctccggtagcgcactattcctgtttttgacgggtattcaacatctgatatctccaacaccgatgacagatccaggcgtcggggttatcgtgacaattgtggcgctaatttgtacgattatccttgtcagctttcagcgttgggtggtgcggcggacgcaaagccaggcggtgcgggctgatatgctacattaccagtctgatgttatgatgaacggcgcaattctgctggcgctggggttgtcctggtacggctggcatcgcgccgatgctctgtttgcattgggaatcggcatctatattttatatagcgcgttacgcatgggatatgaggcggtacagagtttactggatcgcgcattgcctgatgaggaacggcaagaaattattgatatcgtgacttcctggccgggtgttagcggcgctcacgatcttcgcacgcggcagagtgggccgacccgctttattcagattcatttggaaatggaagactctctgcctttggttcaggcacatatggtggcggatcaggtagagcaggctattttacggcgttttccgggaagcgatgtaattatccatcaggacccctgttccgtcgtacccagggagggtaaacggtctatgcttagttaatcagtataaaagagagccagacccgcattttgtgtataaaataccgccatttggcctgacctgaatcaattcagcaggaagtgattgttatactatttgcacattcgttggatcacttcgatgtgcaagaagacttccggcaacagatttcattttgcattccaaagttcagaggtagtcatgattaagaaaatcggtgtgttgacaagcggcggtgatgcgccaggcatgaacgccgcaattcgcggggttgttcgttctgcgctgacagaaggtctggaagtaatgggtatttatgacggctatctgggtctgtatgaagaccgtatggtacagctagaccgttacagcgtgtctgacatgatcaaccgtggcggtacgttcctcggttctgcgcgtttcccggaattccgcgacgagaacatccgcgccgtggctatcgaaaacctgaaaaaacgtggtatcgacgcgctggtggttatcggcggtgacggttcctacatgggtgcaatgcgtctgaccgaaatgggcttcccgtgcatcggtctgccgggcactatcgacaacgacatcaaaggcactgactacactatcggtttcttcactgcgctgagcaccgttgtagaagcgatcgaccgtctgcgtgacacctcttcttctcaccagcgtatttccgtggtggaagtgatgggccgttattgtggagatctgacgttggctgcggccattgccggtggctgtgaattcgttgtggttccggaagttgaattcagccgtgaagacctggtaaacgaaatcaaagcgggtatcgcgaaaggtaaaaaacacgcgatcgtggcgattaccgaacatatgtgtgatgttgacgaactggcgcatttcatcgagaaagaaaccggtcgtgaaacccgcgcaactgtgctgggccacatccagcgcggtggttctccggtgccttacgaccgtattctggcttcccgtatgggcgcttacgctatcgatctgctgctggcaggttacggcggtcgttgtgtaggtatccagaacgaacagctggttcaccacgacatcatcgacgctatcgaaaacatgaagcgtccgttcaaaggtgactggctggactgcgcgaaaaaactgtattaatgatttcggaaaaaggcagattcctttaccctgaaaccgatgacagaagcaaaaatgcctgatgcgcttcgcttatcaggcctacatgaattctgcaatttattgaatttgcaaacttttgtaggccggataaggcgttcgcgccgcatccggcatggacaaagcgcactttgtcagcaatatgaggcggatttcttccgcctttttaatccctcaacatatacccgcaagttatagccaatctttttttattctttaatgtttggttaaccttctggcacgctttgctcatcacaacacaacataagagagtcgggcgatgaacaagtggggcgtagggttaacatttttgctggcggcaaccagcgttatggcaaaggatattcagcttcttaacgttagttatgatccaacgcgcgaattgtacgaacagtacaacaaggcattcagcgcccactggaaacagcaaactggtgataacgtggtgattcgtcagagtcacggtggcagtggtaaacaagcgacgagcgtaatcaacggtattgaagctgatgttgtcacgctggctctggcctatgacgtggacgcaattgcggaacgcgggcggattgataaagagtggatcaaacgtctgccggataactccgcaccgtacacttccaccattgttttcctggtacgtaagggaaatccgaagcagatccatgactggaacgatctgattaaaccgggtgttagcgtgatcacgcctaatccgaaaagctctggtggcgcgcgctggaactacctggcagcctggggctacgcgctgcatcacaacaacaacgatcaggcaaaagcacaggattttgttcgggcactgtataaaaacgtcgaagttctggattctggcgcgcgtggctccactaacacttttgtcgagcgcggaattggcgatgtactgattgcctgggaaaacgaagctctgctggcagcgaatgaactggggaaagataaattcgaaatcgtcacgccgagtgagtctatcctcgcagagccaaccgtgagcgtggtcgataaagtggtcgagaaaaaaggtactaaagaggtggcggaagcctacctgaaatatctctacagcccagaaggtcaggaaattgccgcgaaaaactactaccgtccgcgcgacgctgaggtggcgaaaaagtacgaaaatgcgtttccaaagctgaagttattcaccattgatgaagagttcggcggctggacgaaagcgcaaaaagagcattttgctaacggcggtacgttcgatcagatcagcaaacgctgatttccccaggataattatcaaacccggtggtttctcgcgaccgggttttttatttgtcacgattttgcgttacccttgcatctctttgaggtacagggaaaaaaagatgaaaaaagcgggtcttctttttttggtgatgatagttatcgccgttgtggctgccggtattggttactggaaattaaccggtgaagagagcgatacattacgtaagattgtccttgaggaatgtttgcccaatcagcagcaaaatcaaaatcctagcccatgtgcggaagtcaaacccaatgccggatacgtggttttaaaagatcttaatggcccactgcaatatctgttgatgccaacgtatcgtattaacggtactgaaagtcctttgttgaccgatcctagtacgccgaacttcttttggttggcttggcaggcgcgtgattttatgagcaaaaaatacggccagccggttcccgatcgcgcggtttctttggcgatcaactcccgcaccgggcgtacgcaaaaccattttcatattcatatctcttgtattcgtcctgatgtgcgcaaacagctggataacaatctggcgaacatcagcagccgctggttgccactgccaggtggtttgcgcgggcatgaatacctggcgcgtcgggtaacggaaagcgaactggtacaacgcagcccatttatgatgctggcagaagaagtacctgaggcgcgggaacatatgggacgctacgggctggcgatggtacggcagagtgataacagttttgtattgctggcgacacaacgaaatctactgacgcttaaccgtgctagtgccgaggaaattcaggatcatcagtgtgagattttgcgttaaggcgaagagttaaggaaagtaagtgccggatatgaaatccggcacctgtcagacttaagcctgtttagccgcttctgcagctttaacgattactgcgaaggcgtcagctttcagagaagcaccaccaaccagcgcgccgtcgatatccggctgagcaaacagttctgcagcgttagacgcgtttacagagccgccgtactgaatgatcacttgttcagcgatgttagcgtcaactttagcgatgtggtcacggatgaatttgtgaacagcctgtgcctgagccggagttgcagatttgccagtaccgattgcccatacaggttcgtaagcgataaccgcaccttcgaatgccgcagcaccctgagttttcagtaccgcgtcgatctgacgtgcgcaaacttcttcagttttgcccgcttcattttcagcttcggtttcaccgatgcacagaaccggagtcaggccctgctctttcagcaccgcgaattttttcgcgatcagttcgtcagattctttgtggtaagtacgacgttcagagtgaccgatgatgatgtactgtgcgccgatgtctttcagcatagcagcagaggtttcaccggtgaatgcgccggacaggttcaggtccacgttttgcgcacccagcatgatgtggctgccttcagcttcgcgcttcgccatatcgatatacatttccggtggtgcgattgcaaccgcacagccagcaacacctgccagctctttacgcaggttagaaaccagctcgtgaaccatgtggcggctgccgttcagtttccagttacccatcactaaaggatgtcgcattttaattctccacgcttataagcgaataaaggaagatggccgccccgcagggcagcaggtctgtgaaacagtatagagattcatcggcacaaaggctttgctttttgtcatttattcaaaccttcaaggctttcagatagcgccagcttaatcggttcaacagcgaaggtcagccccttttcgccgttgtccgcgacaacataacgcagtgcaccttctgtctcggtgtaataacgtttgtttttccccgccgttagtaggctctgcagttttttctggctttgtgttttggtcattaatggggtgagtgtgcggatcaccgctgccatgtattcctgagctttcgctttcgcggctttttgctctggcccctggatgggtagccaggtcatttgaatgcttttgatttttaaggtaccgcgctccagcgctgtagaagcatacaagttctcattaattttacttgcagcacgagtgagattggctttgtcgggactgctgtcgatggcacgaaattcgttcagtggcaggctgggattctggctgttaaagtcttctcgaaactggctgatggagagatcgaaagtaggggctccagccagcagataaggcgcggtcgttgccgtatctggtgtttgtgcatgcgcctctgttgtaacggttaatgcagaacataagagaaaaaacagcgtacaccctggcttcattgacagtaccttttgttatgactggctccgattaaaacgatatctgtcgcccttgtcaaaagggtagaatcctggaaaagacaaccatcaaggaacttacatgaccatacagcaatggttattcagttttaaagggcgtattggacgccgtgatttctggatttggataggcctgtggttcgcaggcatgctggtgcttttcagtctggcgggtaagaatctactcgatattcagaccgcggcgttttgccttgtgtgcttgctctggccaacagcggcagtaactgttaagcgcttgcatgatcgcgggcgttccggcgcatgggcatttctgatgattgtggcgtggatgctgctggcgggtaactgggcgattttaccgggtgtctggcaatgggcggtggggcgttttgtcccgacgttgattctggtgatgatgcttatcgatcttggtgcgtttgttggcacacaaggcgaaaataaatatggtaaagatactcaggatgtgaagtataaagccgacaataaaagtagtaattaacctttaatatatctcttactgctatttttttccgggattgttatttccacgatgcaaatgacaatacccggaaaatccttctgaactcttcaccttaagcaatatcaaaaaaaatggtaatccataagatcattacttgtttgttcttcccttaacggcgcattattcttaagtcgtaatcgacagagaggcgaatatacagaggtgccctatgaaagatgtcgtagataaatgcagtactaaaggatgtgcgattgatatcggtacggtgattgataacgacaactgtaccagtaagtttagccgcttttttgccacccgcgaagaagcagagtcttttatgaccaaactgaaagagcttgccgccgctacatcctctgcagatgaaggggccagcgtggcctataagattaaggatctggaggggcaagttgagcttgatgcggccttcactttcagttgccaggccgagatgattatttttgagttaagtctgcgtagcttagcttgatggagttgctttagaaggagttaaacatggcttataaacacattggcgtggcaatttccgggaatgaagaagatgccttactggtgaataaagccctggagctcgccagacataatgacgctcacctgacgttaattcatattgatgatggcttaagcgagttgtatccgggtatctacttccctgcaacagaagatattcttcaattgttgaagaataagagcgataacaagctgtataaactgacgaaaaatattcaatggccgaagacaaaactgcgtattgaacgcggagaaatgccggaaacactgctggaaattatgcaaaaagagcagtgcgacctccttgtctgtggtcatcatcacagttttatcaaccgtttgatgccggcatatcgcgggatgatcaataagatgagtgcggatttgctcatcgtgccgtttatcgataagtaaccgcttaccagtaatgctccgctgtcatatggcccggtcggcgacgtaaatgtttcgtcatctgccgggtctctttcagcaactgttgtgtatcgcgcaccatctgtggattgccgcacagcatcacatggctggtttctttattcatcggcaggccaatcgtgctttccagttccccactttcaattaatgccggtatccgtccggtgaggctccccgctgccgtttcccgactgaccaccgtctgaatgcgcagttttccttcgtagcgtttttccagttcctgcatcagtggcaaatagcttaagtcggcggcataacgtgcggcgtgcaccaggaccagatttttgaagcgatctaaatctttacctagttgcagaatgcttaaataagggccaatcgctgtaccggttgccagcatccatagcgtttcgcagtgcggcacttcatcgagcacaaagaatcctgccgcttcgctaaccacctgcacttcatcgcctggtttcagtgccgccagtcgtgggcttaatttgccatcggggacggtgaccaggtaaaactccagatcgggattatcggggctgtttacataggagtaggcgcgctggacgcgttcgccgtcgatttcaaggccaagcttggtaaattgcccggcggtaaacggaagcacgggggcgtgaacggtgagactaaacagggcgtcggtccagttctgcactttagtgactttgcctgttacccaatcagccatgtttttctcctgttttgattgacttgccttatcttcgttctccgaacaaaaaaattccagtcccgaaggactggaaggctcaatcgatcaaatcaatcagaggatgtgcacctgcatttccgggtctttgcgatccagatagtggatggactgaatgcggcgaatggtgcgactcttgccgcggatcagcagcgtttcggtagtcgcgatattgcctttgcggctaatgccttccagcagatcgcctttggtaataccggtggcagagaagatgacgttatcgctgcgcgccatatcgcccaggcgcaatactttaccggcttcgatgcccatcgctttgcagcgtgccagctcctgctcgccaatgcgacgattctcttcgttgtcgcctttgacgtcatgacgcgccagcagacgaccgttcatgtcgccatctaatgcgcggatcaccgccgcagaaactacgccttccggcgcgccaccaataccgtacagcacgtcaacttcgctgtctggcatacaggtgagaatactggccgcaacgtcgccgtccggaatagcaaatacgcgtacgccgagttgctgcatttcagcgataacggcatcgtggcgtggtttagccagaatcgttaccgtcagttcgctcaacggtttgccgagcgccgccgctacattgcgcaggttatccgccagcggcaggttcagatcaatggtgcctttggctcccggcccgacaatcagcttctccatatacatatccggcgcattgaggaagcagcctttatcgcctactgccagcaccgccagcgcgttagcctggcccatcgccgtcatgcgcgtgccttcaatcggatcaacagcaatatctaccgcgtcgccgcgaccagtaccgactttttcaccaatgtagagcatcggtgcttcgtcgatttcaccttcaccaatgacgatggtgccgtcaatgttgacctggttgagcataatacgcatggcgtttaccgccgcgccgtccgcggtgtttttatcgccgcgtcctaaccatttgtagccagccagcgccgcactttcggtgacgcgggaaaattcgatggcaagttctcgtctcatagcaaactctaagcagtaaggaatggcgcgaagtgtagcacaggggaagggagggattattgatgtgtgcggggttgcccccgcacgtttcgggactaccggatgcggcataaacgcttcattcggcatttacattattcgtcgtgttcttcccacgccatcgcgcgtttaaccgcttttttccagcctgcgtaacggtaattacgctcagtggtttcgatgcctggacggaactcgcgctcaatcaccgctttctcttgcagctcgtcgaggttctgccagaagccaaccgccaggcctgcgagataggccgcacccaatgcggtgacttcgcgcacttccgggcgctcaacgcgggtgccgagaatatcggactggaactgcatcaggaaattgtttgctactgcgccaccatccacgcgcagggcgtgcagacggataccagagtcggcctgcatcgcttccagcacgtcacgcgtctgataagcaatagactccagcgtcgcgcgtataatgtggttagcgttcaccccacgagtcagaccgaaaatcgccccgcgcgcatacgggtcccagtacggcgcacccagcccggtaaatgccggaaccacatacacaccattggtgttttgcactttggtggcgaaatattcggaatcgtaggcgtcgttaatcaacttcatttcatcgcgcagccactgaatggatgcgcctgccataaacaccgcaccttccaacgcatagttcacttcgccagtcgggccgcaggcgatggtggtcagcaggccgttttcacttttcaccgctttctcgccagtgttcatcagcataaagcagccagtgccataggtgttcttcgccatcccttctttcacgcacaactgaccaaacagcgcggcctgctggtcaccggcgatcccggagattggaatacgcgtgccgcctttgccgccaatgttagtctgaccgtatacttcggaagaacgacgcacttctggcagcatctcgcgcggaatatccagcacttccagcattttgtcgtcccagtccagggtatggatgttgaacaacatggtacgagaggcgttggtgtaatcggtcacatggacacggccctgagtcattttccagataagccacgtatcaaccgtaccaaacagcaattcaccacgacgtgcacgctcgcgagagccttccacatggtcgaggatccacttcactttggtgccagaaaagtacgggtcaatcaccagaccggtattgctgcggatataatcttctaaaccgtcacgttttaaatgctcgcagatttctgcggtacgacggcactgccagacaatggcgttatagataggcttgccggtttctttttcccagacaatagtggtttcacgctggttcgtaataccgatagctgcaatttgatcggaactgatatcggctttcgccagcacttctaccagcgtggagctttgggtggcccagatttccattgggtcgtgttctacccaacctggttttgggtagatttgctcaaattcgcgctggctcacgctaatgatattggcatcgtgatccattacgaccgcgcgggagctggtggtgccctggtcgagcgcaacgatatattttttttcagtcatgtttaattgtcccgtagtcatattacaggctagctttttgttcactaggagttgtggtttccttttcttccacaacacagatatcgcaaggcaaatggcgaccaatcagtttgcggtaggcaaatgcacctacaatcgcgccaacgatagggccgaaaagcggcaccaggaagtaaggaatgtctctgccgccggtaaaggcgacattgccccagcccgccagccaggcaaagactttcggaccgaagtcacgcgctgggttcatggcaaaacctgtcaatgggcccatagatgcgccaatgaccgcaatcagtagaccaatcagcaagggagccaaagggccgcgtggtacaccgttgccatcgtccgttaacgccaggatcagccccatcagaatagcggtaatcaccatctcaactgcgaaagcctgcacaaaattgatatgaggattagggtaagtagagaaagtgccagccagatcaacactttcaacgctgccgcgaacaatgtgatgagtctgctcgaagtcgaaaaataaattgtagtaaagcccgtaaactaaagccgcagcacagaaagcgccggcaacttgactaacgataaaaggaataactttgcgcttgtcgaaacaggcaaacagccacaatgcaatggtaacagcgggattaagatgcgcgccggaaacccctgcggtcaggtagatggccattgccacccccagtccccaaatgacactgatttcccactgaccaaaagacgcaccagcgacttttagtgctgcaacgcaacccacaccgaagaaaatcaacaacccggtaccgaggaattcagcaatgcactggcctttcaaggtacttgtttgactcataatcggatcctgaagagttaatgtttgttgtatgcgtgaaagtcacggacctccacgatgcttgtaggcatgctgtaaacttatcgttaacgagcaaaaacgagaaatatcgaacttaaaatgtgtgtgcctcgtcataaaatgagcgttatcgcgccatttattccatctgattgtacatgatgcatgtttgttagatcattcgcgcaacaaatttattaacattttcgattgatgtggattatgtcaccaggagaaggatgaaaagtgtggcaaaccgtaatctgcaaggcgtgccgctggacagcgatggcgcggcttcatacaatcggagctaactaaagtgcgctcgtatttattaaggcgtcaccggtaatcgggacgaggatttttatccatcaacgccttgcaattcaggagaggtatgacaatgagtttagaagtgtttgagaaactggaagcaaaagtacagcaggcgattgataccatcactctgttgcagatggaaatcgaagagctgaaagaaaaaaacaacagtctgagccaggaagttcaaaatgcccagcatcagcgcgaagagctggagcgtgagaacaaccatctgaaagaacagcagaacggctggcaggaacgtctgcaggccctgctgggtcgcatggaagaggtctgattacgcttcatcttccgcgtaatttctttactgtgtaggccaacaggtaacgcagaaaaaaggcaccttgcggtgcctttcttatcattcaatatccagcggatcttcactaagaataatcccggtattgtcggcataaagatggtcgccggagaagaaggtgacaccgccaaaattgacgcggacatcgctttcgccaatgccttcgccagcggcaccaaccggaattgccgccatcgcctggatgccgatatccaactcttccaggtcatctacctgacgcaccgcgccgtaaatgaccagaccttcccattcattttgtactgccagacgcgccagttcagcatcgaccagtgcgcgacgaacagaaccaccgccatcgacgacaagaacacgaccacggccattctgttcgagcagatcgtacagcaacccgttgtcctcgaaacattttaccgtgattatttgtccgccaaagctcgcccgtccgccaaagttggagaacagcggttccacgacgttaacatcttcttgatagatgtcacaaagctcggaagtatcgtatttcataggcttaacattcagttgctgcgagaattttcagtatatcgcgctatgtgggctgttggcaaaatcatcaattgttaattgatatttgtcagttatgctgcccactggcttaggaatatccctaaaacaaacagcaggttagtcagtaacgctcccttgacagtacgttccagcattggtcgcatcgccaccgggtccatttcccgcatcacataacgggcttgcttcaccagtaatggtgccgccagcaggaacagccagccccacaggctatgcaggctaaagagattaaacagcgccagacacaccaggctgcccatcagcaggcaggcatgataacgacgcgcgttcacttcacctaagcgcaccaccagcgtgtttttgccattttcgcggtcgctattgatatcacgcaggttattaatattcagtactgccgttgccagcaggccgcatgcggtcgccggaaggatcagtgccggaatcaatgtatgagcctgtaaataccagctccccatgacactcaaccagccaaagaaaaccagtacggaaatatcacccagaccgatataaccataaggacgattgcccacggtgtaggtgatagcggcaatgatgctcaacccgccaagaatcaggaaaccgacaaaatcggccagcgtatggcatgccactgcaaccagtgccagcccggagagacagatgagcacgacggtaataatgagcgcccgtttcatctcttgctgggtaatgacccctttttgcatgccgcgtagcggcccaatgcggtcaggtttatcgctgccttttaccgcatcgccgtaatcattggcgaggttagaaaggatctgtaatagcccggcggtaattagtgccagcagggcgaccagcggatcgaagtgaccttgccaccatgccagcgctgtcccgacgataattgcagcaaaggcgagggggagggttttaggtcgtaaactttccagccacgcctgagttcggctaatttgttgttcagtcataatacgcgccaataaaaatggggcctttcagccccatcaaacaatgatgaaaatgattgaacgcgattataggataaaacggctcagatcttcatctgccaccaacgcatccagatgtttgctcacataatctgcgtcaatagtgatattttgaccgcttaaatcgctggcgtcgtaggaaatctcttccattaaacgctccagaacagtgtgtaaacgacgagcaccgatgttttcggtagattcgttcacctgccatgccgcttccgcgatgcgtttaataccggagtcggtaaactcgatatttacgccttcagtcgccatcagtgctttgtactgcacggtgatagaggcattcggctcggtcagaatacgctcgaagtcgctggtggtcagcgcctgcagttcaacgcggattggcagacgaccttgcagttccgggatcaggtcagacggtttcgcaatctggaacgcgccagaagcgataaacagaatgtggtcagttttgaccatcccgtgtttggtggaaacggtgcaaccttctaccagcggcagcaggtcacgctgaacgccttcacgagaaacatccggaccggaagactcgccgcgcttacagattttgtcgatttcgtcgataaacacgatcccgtgctgctcaacagcgtcgatagcgtcttgcttcagctcttccgggttcaccagtttcgccgcttcttcttcaatcagcagcttcatggcgtctttgattttcagcttacgcgctttttgcttctggccgcccaggttctggaacatggactgcagctggctggtcatctcttccatgcccggaggagccataatttcaacgcccatcggtgctgcggcaagatcgatctcgatttctttgtcatcaagctggccttcacgcagttttttgcggaatgcctgacgagcagcggacggttcctgctgctgttcggtctgtccccagttgtttttagcaggtgggatcagcacgtcgagaatacgttcttctgccagttcttcagcgcgataacggtttttctcgatagcctggacgcgtaccattttcacggcggcatcggtcagatcgcgaataatagaatccacttccttaccgacgtagcccacttcggtgaatttggtcgcttcaactttgatgaacggcgcattcgccagcttagccagacgacgggcgatttcagttttaccgacaccggtcgggccgatcatcaggatatttttcggggtcacttcatggcgcagctcttcgttgagctgcatgcgacgccagcggttacgcagagcaatcgccacagaacgcttggcgttgtcctggccgatgatgtgcttatccagttcgctgacgatttcgcgtggggtcatttcagacatgggagatccttacgctttgtagcttaattcttcgatggtgtggaaatggttggtatagatgcaaatgtcgcctgcaatatccaacgccttttcagcaatttcacgggcgctaagttcagtgttttctaacagcgcgcgcgccgcagcctgggcgtaagggccgccggagccgatagcaataagatcgttttctggctgcaccacgtcaccgttaccggtgatgataaggcttgcagtttcatccgcgactgccagcagtgcttcaagtttgcgcagcatgcgatcggtacgccagtcttttgccagctcaacggcggctttgaccagatggccctgatgcatttccagtttacgttcaaacagttcgaacagcgtaaaagcatccgcagtaccgcccgcaaagcccgcgatgactttgtcgttgtacagacggcggacctttttcacgttgcctttcattacggtattgcccaacgtggcctgaccatcaccagcgatgaccacatggccgttacggcgtacgcttactatagttgtcacgagctgaccccttggttacgaatacagagtacaaaccccgtacaaaagtacggggcataatgcaattatagatgggggggattttgagggtttcaacccccggcggcgagccgaatgcagtttgtatgacccgccatcttcaaccgattgagggtgctgtctgcgttctctttgcctttcaccgggccaatgaccacacgattccagccattgttggtggtgattttgctgtcaaagccttcgaacgccagctgagcacgtaccgtctctgcctgttccgcgcctctgaagctaccgcactgcaccatccagcggcgttcgtcttttttctccgccgtcggttttggcgcgtcagcggcacgagcaactggcgcagcttgctgcggcttgctctgcgcagtcgtgtgcgcaggagtttgcagcagatcctggtacggctgctgagaagaagccggtttagactggcgcggttgcgcctgtaccggtgcggcttggctcgtacgcgtctgctgctgccagctttgttcagtcgtacggctctgctgagccaggcgttgctgttccgctaattgctgcgcctgacgttggcgctgtagcgtttgctgacgctgttccggcgtctgttcattccacggaacttcaaccagctgcgttggctgctggcgcatatcagcctgcatttgttcaagaagctgacgttgttctggtgtcagttgctccggcgttttcacttcaccaccggcagaaggttctgtgggcgcacgcactcccggctggcgactttccagctctttaatgtagcgccagcgttcttctggttttggtggtagtccgtttccggtcactttctggctttgcagcgtctcggactcttctttcttgtgatgcgtaatgaagtacagaccaccgataaaggtcacaagaacggcggcagcaatagcgaccatagcgggagaaaccgcaggcagatttcgttgctttttccgactggtgctcttttttcgccggctaggtgccggttggctgcggcgtacataatctcgttgtgccactatcgtttcgctgtatttattcgttcgtcagcccgccatgttacttaagcggcgggcctttgaccagtcacggcagtcttaaaggtttactttaaggtaacgcgcgtgtacttccccggatgataagttcgcagtccattaaacgagagccactgccaacgtgttgcccctgcatttgatcaagcaataacagcatagcttcccgaccgatttcgtaacgcggctgcgcgatggttgtcagcggcggatcacaaaattgcgtcaggtcgatgttatcaaaaccgattatggaaaggtcttccgggactttcagcccctggcgttttgcctgagaaagtgcgccgagcgccatcacatcgctatggcagaagacagcagtaggcggttgtggaagatcaagcagctgctgcatcgctttgcttccggcttcgaaggtgaagtcgccacgggcgatgtattgcggatcaaccataatgccgcagcgacgcagcgcctgaacatagccttgcaggcggtagtgacacagcggcatctcttcgggaccggctatacagccaatccgtttatgcccttgctcatataaataatttactgcatcaaatgcggcggtcagattgtcgatatgaactgtaggcagctccagctccggtgcaaattcgttcgccatcaccatcggcggcagattacgctgttcctcaatgctggcatcaaacggcagcctactacccagcaacaacatgccatcaatttgcttggtgatgatcaaatcgataaaggttttttcctgctgattttgatgcgcacagtcgccaatcagcaccagatatccgtgatttgccgccgtaacttcgataccgcgaataatttcgctaaagaagggatcgcagatatccgggacaatcaccagaatggtgcgggattcattacgcttgacgttgcgccccataggctgcggtaaataacccacttcccgggccgctttttcaacccgattacgggtggcctgggagactttatcgggattcattaatgctcgggagacggtcgctgtagagacttttgccttgagggcaacgtctttcatggtcgcggcagtttcctgcttcttcgctttcacactcactcctcgcctggcacgtcaggcgtactacatccatgtttacttcacatcggcaacatttttagcagatagcgcgtgaaaacggttacagaattttcatgaaaagtgtgatgaatattgaatttttcgatccgcctcgcatcgtgagcggtttaaccctcaatcggatcaacatccagcacccatttcaccttacgggaatccggtattgtattgatgagcgccagcgtaccgttaatgatgtgttgcaagcgcacgcgggaagggtgctgcaacaatatctgccagcgccagcgaccgccacgtttaggtgccagagccggaaccggaccgagaacccacagtttctcgtctgccagtgggctggagaggatcagattacgcagttgttgcaggaacaatggcgcgtgctgattgttatgatcttccgcacgcacaatcacatggctggtccacggcggtagctgcatcattcgccgctcagccagcgcctgttcggcaaaggcgtcgtagcctttatagagcaacgtttgcaacagaggatgttccggatggtgcgtttgcagcaccacttcgccctgtttacccgcacgcccggcacgaccggcgacctgggtgtaaagctgagcgaaacgctctgcgctgcgaaaatcggcagaaaacagcgcgccgtccacgtccagtaatgcaaccagcgtcacatccgggaaatggtgacctttcgccagcatttgtgtaccaatcaaaatccgcgcgccgccgcgatgtacttctgccagttgctgttccagcgcccctttgcggctggtggtatcgcggtcgatacgagaaatgggcacgccggggaacaacggcgcgagcgtctgttcaagctgttcggtgcccagccccacggggaccaggtgcgtggaaccgcaggaagggcactggcgcggcaccggacgctgactgtcacagtggtggcagcgcagatggtgctgcgcctgatgcagcgtgtagtagtgatcgcaacgtgggcattcggcaatccagccacagtcgtggcacagcagtgcaggcgcaaagccacggcggttaagaaagagaatgacctggttatcagcctgtaaatgctggcgcatacgagtgattaacgccggagccagacctgcctgcaccttctgaccttttaaatccagcacatgttgaattgccggacgcgcattccctgcccgacgggtcaggcgcagcaggcggtattttttctgctggacgttgcataacgtttccagcgcgggcgttgcggagccaagaataatcgggatttgctcgctgtgcgcacgatacaccgccaggtcgcgggcatgatagcgccagccttcctgctgcttgtaggagctgtcgtgctcttcatcaatgacaatcacgccgagatttttaaacggcgtaaacagcgcggagcgggtgccgatcacaatcgccgcctcaccatttttcgctttcagccacgcgctaagacgctcgctgtcgttcaggccggaatgcagaacttccacgggggcattaaaacgttcacgaaaacgggcgatagtttgcggtgtcaggccgatttccggcaccatcaccagcgcctgtttgccctgagcgagcacgttttccagtacgctgagataaacctccgttttaccggaaccggtaacgcccgccagcagccaggcagaaaaagtatctgccgcgctatgaattgcgccaacggcggtggcctgttcggtattcaatcgcaaccgctcaccagaaacggcatagttcgttcgccagtcgctaaactctggtgtttcacttgctaaatcacacagaccttttttgcgtagcgcctgcaacgcggcatcattaaattcgagcgtggcgacctggtcgcgccagattttgccttgccgtaacgccgccagcgcctgttgttgcttgggggagcgtttcaggctgttcagatccaccgcctggccttgttcagtggcaaaccagtaccacatcggcgcgttcgccgcaggccgcccctggcgtagtaaaatcggcaaggcatgaaacagcacatcgccaatcggatgatgatagtaatctgccgcccatagcagcaatcgccagacggagtgagtaaacaccggctcactatccagcacttcgactaccgcttttagctcattgagcggcagttcgctggcatcgctaacacttaccacaatcccgatgcgctcctgctgtttgccaaacggcacgcgcacgcgacacccagctttaaccgtcatgccttctggcagcagatagtcaaaggtacgaggaagcggaacgggcaaggcaacgtgggcaacgggcatagcatcatcctgacttgaaattcggtgggttagtatacacattgccgtagaagagtgcggatcagtttgcatacgctggttaatttctgtatgatttcgcgccttcgtacgaaatgatcgtattgaagctatacttttaacatcgcgtggtgtctggcgttagggctggaagagcgacgcggccttaaaccgaggttttcccatgaaaaaagatattcacccgaaatacgaagaaattactgctagctgctcttgcggtaacgtaatgaaaatccgctccaccgttggtcatgacctgaacctcgacgtgtgcagcaagtgccacccgttcttcactggcaaacagcgtgatgttgctaccggtggccgtgttgaccgcttcaacaagcgtttcaacatcccgggcagcaaataagaccggatttccgaaaaaagcgccgcacggcgctttttttgtgcctgaattttggtcgtattaccagctaaacagcggccattctttggcgaccgtggtgagttgtggcgcatcgaaaacggcttgtgggctgaccaccgtttcctcaagcggaatattcttgccgtaacgttctttgagctttgcctgaacttgtgggctgctcaggtcgaactctttcaacttctgctgctcgcccacgcgcattcccagcgcgttctggtaaaccttccacaccacttcgctacagtactggcgatcgtcgctccaactgaagctgaaatcatacggtttaccgagataacgttttgccgtttgcgccagtttttgctgttgttcaacactcagtccgccttcaacgcggcgaacaacgtatttgcccttttcaccatgggcgatccactgcttgagcggggtgtatttcaccgggccgactgcttcaaaaacgtagggctttttgttgcgtatcaccagcataccggtgtggctataatcggtatgggtcgccagttggatcgctttactttggctactgcgagagatctgaaagatgatgtcgccggtttgtggctgccaggcaaaggcaggtacagaaaccagcaggctgaggatcagcagcctgtttttcatagttaaacgtccatgtataaaaagcggtgggtcgcagacaacgtgctcgttgtttatgccggatgcggcgtgaacgccttatccggcctacaagttcgtgcaaattcaataaattgcaatatgacgtaggcctgataagcgtagcgcatcaggcgattccactccgcgccgctcttttttgctttagtattcccacgtctccgggttaatccccatctcacgcatgatctcttttgccgcttccgggatttcgtcgctgcgctctttacgcagatcggcatcatccggcaaaggttgcccggtaaaggcatgcagaaacgcttcgcacagcagctcgctgttggtagcgtgacgcaggttgttcacctgacgacgcgtgcgttcatcggtgaggatttttaacaccttaagaggaatggaaaccgtaatctttttgacttgttcactcttcttgccgtgctcagcgtatgggctgatatattcgccgctccattcagccatgagatacttaatcctcttcgtcaataaattgagaccagaccacacagttgatgtgggtactgaccgtaaacccgcatagtttaccgtacaggcgttaccgtgacatcgtgtaatgcacctgtcggcgtgataatgcatataattttaacggctatttgggatttgctcaatctatacgcaaagaagtttagatgtccagatgtattgacgtccattaacacaatgtttactctggtgcctgacatttcaccgacaaagcccagggaacttcatcacatgacgcgtaaacaggccaccatcgcagtgcgtagcgggttaaatgacgacgaacagtatggttgcgttgtcccaccgatccatctttccagcacctataactttaccggatttaatgaaccgcgcgcgcatgattacagccgtcgcggcaacccaacgcgcgatgtggttcagcgtgcgctggcagaactggaaggtggtgctggtgcagtacttactaataccggcatgtccgcgattcacctggtaacgaccgtctttttgaaacctggcgatctgctggttgcgccgcacgactgctacggcggtagctatcgcctgttcgacagtctggcgaaacgcggttgctatcgcgtgttgtttgttgatcaaggcgatgaacaggcattacgggcagcgctggcagaaaaacccaaactggtactggtagaaagcccaagtaatccattgttacgcgtcgtggatattgcgaaaatctgccatctggcaagggaagtcggggcggtgagcgtggtggataacaccttcttaagcccggcattacaaaatccgctggcattaggtgccgatctggtgttgcatagttgcacgaaatatctgaacggtcacagtgacgtagtggccggcgtggtgattgctaaagacccggacgttgtcactgaactggcctggtgggcaaacaatattggcgtgacgggcggcgcgtttgacagctatctgctgctacgtgggttgcgaacgctggtgccgcgtatggagctggcgcagcgcaacgcgcaggcgattgtgaaatacctgcaaacccagccgttggtgaaaaaactgtatcacccgagcttgccggaaaatcaggggcatgaaattgccgcgcgccagcaaaaaggctttggcgcaatgttgagttttgaactggatggcgatgagcagacgctgcgtcgtttcctgggcgggctgagcttgtttacgctggcggaaagtttagggggagtggaaagtttaatctctcacgccgcaaccatgacacatgcaggcatggcaccagaagcgcgtgctgccgccgggatctccgagacgctgctgcgtatctccaccggtattgaagatggcgaagatttaattgccgacctggaaaatggcttccgggctgcaaacaaggggtaaaaatgagtgtgattgcgcaggcaggggcgaaaggtcgtcagctgcataaatttggtggcagtagtctggctgatgtgaagtgttatttgcgtgtcgcgggcattatggcggagtactctcagcctgacgatatgatggtggtttccgccgccggtagcaccactaaccagttgattaactggttgaaactaagccagaccgatcgtctctctgcgcatcaggttcaacaaacgctgcgtcgctatcagtgcgatctgattagcggtctgctacccgctgaagaagccgatagcctcattagcgcttttgtcagcgaccttgagcgcctggcggcgctgctcgacagcggtattaacgacgcagtgtatgcggaagtggtgggccacggggaagtatggagcgcacgtctgatgtctgcggtacttaatcaacaagggctgccagcggcctggcttgatgcccgcgagtttttacgcgctgaacgcgccgcacaaccgcaggttgatgaagggctttcttacccgttgctgcaacagctgctggtgcaacatccgggcaaacgtctggtggtgaccggatttatcagccgcaacaacgccggtgaaacggtgctgctggggcgtaacggttccgactattccgcgacacaaatcggtgcgctggcgggtgtttctcgcgtaaccatctggagcgacgtcgccggggtatacagtgccgacccgcgtaaagtgaaagatgcctgcctgctgccgttgctgcgtctggatgaggccagcgaactggcgcgcctggcggctcccgttcttcacgcccgtactttacagccggtttctggcagcgaaatcgacctgcaactgcgctgtagctacacgccggatcaaggttccacgcgcattgaacgcgtgctggcctccggtactggtgcgcgtattgtcaccagccacgatgatgtctgtttgattgagtttcaggtgcccgccagtcaggatttcaaactggcgcataaagagatcgaccaaatcctgaaacgcgcgcaggtacgcccgctggcggttggcgtacataacgatcgccagttgctgcaattttgctacaccagtgaagtggccgacagtgcgctgaaaatcctcgacgaagcgggattacctggcgaactgcgcctgcgtcaggggctggcgctggtggcgatggtcggtgcaggcgtcacccgtaacccgctgcattgccaccgcttctggcagcaactgaaaggccagccggtcgaatttacctggcagtccgatgacggcatcagcctggtggcagtactgcgcaccggcccgaccgaaagcctgattcaggggctgcatcagtccgtcttccgcgcagaaaaacgcatcggcctggtattgttcggtaagggcaatatcggttcccgttggctggaactgttcgcccgtgagcagagcacgcttagcgcacgtaccggctttgagtttgtgctggcaggtgtggtggacagccgccgcagcctgttgagctatgacgggctggacgccagccgcgcgttagccttcttcaacgatgaagcggttgagcaggatgaagagagcttgttcctgtggatgcgcgcccatccgtatgatgatttagtggtgctggacgttaccgccagccagcagcttgctgatcagtatcttgatttcgccagccacggtttccacgttatcagcgccaacaaactggcgggagccagcgacagcaataaatatcgccagatccacgacgccttcgaaaaaaccgggcgtcactggctgtacaatgccaccgtcggtgcgggcttgccgatcaaccacaccgtgcgcgatctgatcgacagcggcgatactattttgagcatcagcgggatcttctccggcacgctctcctggctgttcctgcaattcgacggtagcgtgccgtttaccgagctggtggatcaggcgtggcagcagggcttaaccgaacctgacccgcgtgacgatctctctggcaaagacgtgatgcgcaagctggtgattctggcgcgtgaagcaggttacaacatcgaaccggatcaggtacgtgtggaaagcctggtgcctgctcattgcgaaggcggcagcatcgaccatttctttgaaaatggcgatgaactgaacgagcagatggtgcaacggctggaagcggcccgcgaaatggggctggtgctgcgctacgtggcgcgtttcgatgccaacggtaaagcgcgtgtaggcgtggaagcggtgcgtgaagatcatccgttggcaagtctgctgccgtgcgataacgtctttgccatcgaaagccgctggtatcgcgataaccctctggtgatccgcggacctggcgctgggcgcgacgtcaccgccggggcgattcagagcgatatcaaccggctggcacagttgttgtaatttcagaaatttaataatgcccggtactcatgttttcgggtttatggtttctaatgaaatatattgaattatcataggattaggccggattaagcgtttacgacgaatccggcaagaagcaataagtacatggttagtttatatttgcagtccggtttgctttgcataccggattttctttttcttaccatcctgaagttttttcatcttccctgatttttcctcaccatcattggtcatttttcggttgacgcccttcggcttttccttcatctttacatctggacgtctaaacggatagatgtgcacaacacaacatataactacaagcgattgatgaggtaaggtatgagcttttttcacgccagccagcgggatgccctgaatcagagcctggcagaagtccaggggcagattaacgttagcttcgagtttttcccgccgcgtaccagtgaaatggagcagaccctgtggaactccatcgatcgccttagcagcctgaaaccgaagtttgtaagcgtgacctatggcgcgaactccggcgagcgcgaccgtacgcacagcattattaaaggcattaaagatcgcactggtctggaagcggcaccgcatcttacttgcattgatgcgacgcccgacgagctgcgcaccattgcacgcgactactggaataacggtattcgtcatatcgtggcgctgcgtggcgatctgccgccgggaagtggtaagccagaaatgtatgcttctgacctggtgacgctgttaaaagaagtggcagatttcgatatctccgtggcggcgtatccggaagttcacccggaagcaaaaagcgctcaggcggatttgcttaatctgaaacgcaaagtggatgccggagccaaccgcgcgattactcagttcttcttcgatgtcgaaagctacctgcgttttcgtgaccgctgtgtaagcgcgggcattgatgtggaaattattccgggaattttgccggtatctaactttaaacaggcgaagaaatttgccgatatgaccaacgtgcgtattccggcgtggatggcgcaaatgttcgacggtctggatgatgatgccgaaacccgcaaactggttggcgcgaatattgccatggatatggtgaagattttaagccgtgaaggagtgaaagatttccacttctatacgcttaaccgtgctgaaatgagttacgcgatttgccatacgctgggggttcgacctggtttataaatagtgtggcttttgtgaaaatcacacagtgatcacaaattttaaacagagcacaaaatgctgcctcgaaatgagggcgggaaaataaggttatcagccttgttttctccctcattacttgaaggatatgaagctaaaacccttttttataaagcatttgtccgaattcggacataatcaaaaaagcttaattaagatcaatttgatctacatctctttaaccaacaatatgtaagatctcaactatcgcatccgtggattaattcaattataacttctctctaacgctgtgtatcgtaacggtaacactgtagaggggagcacattgatgagcacgagtgacgatatccataacaccacagccactggcaaatgcccgttccatcagggcggtcacgaccagagtgcgggggcgggcacaaccactcgcgactggtggccaaatcaacttcgtgttgacctgttaaaccaacattctaatcgttctaacccactgggtgaggactttgactaccgcaaagaattcagcaaattagattactacggcctgaaaaaagatctgaaagccctgttgacagaatctcaaccgtggtggccagccgactggggcagttacgccggtctgtttattcgtatggcctggcacggcgcggggacttaccgtagtatcgatggacgcggtggcgcgggtcgtggtcagcaacgttttgcaccgctgaactcctggccggataacgtaagcctcgataaagcgcgtcgcctgttgtggccaatcaaacagaaatatggtcagaaaatctcctgggccgacctgtttatcctcgcgggtaacgtggcgctagaaaactccggcttccgtaccttcggttttggtgccggtcgtgaagacgtctgggaaccggatctggatgttaactggggtgatgaaaaagcctggctgactcaccgtcatccggaagcgctggcgaaagcaccgctgggtgcaaccgagatgggtctgatttacgttaacccggaaggcccggatcacagcggcgaaccgctttctgcggcagcagctatccgcgcgaccttcggcaacatgggcatgaacgacgaagaaaccgtggcgctgattgcgggtggtcatacgctgggtaaaacccacggtgccggtccgacaagtaatgtaggtcctgatccagaagctgcaccgattgaagaacaaggtttaggttgggcgagcacttacggcagcggcgttggcgcagatgccattacctctggtctggaagtagtctggacccagacgccgacccagtggagcaactatttcttcgagaacctgttcaagtatgagtgggtacagacccgcagcccggctggcgcaatccagttcgaagcggtagacgcaccggaaattatcccggatccgtttgatccgagcaagaaacgtaaaccgacaatgctggtgaccgacctgacgctgcgttttgatcctgagttcgagaagatctctcgtcgtttcctcaacgatccgcaggcgttcaacgaagcctttgcccgtgcctggttcaaactgacgcacagggatatggggccgaaatctcgctacatcgggccggaagtgccgaaagaagatctgatctggcaagatccgctgccgcagccgatctacaacccgaccgagcaggacattatcgatctgaaattcgcgattgcggattctggtctgtctgttagtgagctggtaagcgtggcctgggcatctgcttctaccttccgtggtggcgacaaacgcggtggtgccaacggtgcgcgtctggcattaatgccgcagcgcgactgggatgtgaacgccgcagccgttcgtgctctgcctgttctggagaaaatccagaaagagtctggtaaagccagcctggcggatatcatagtgctggctggtgtggttggtgttgagaaagccgcaagcgccgcaggtttgagcattcatgtaccgtttgcgccgggtcgcgttgatgcgcgtcaggatcagactgacattgagatgtttgagctgctggagccaattgctgacggtttccgtaactatcgcgctcgtctggacgtttccaccaccgagagtctgctgatcgacaaagcacagcaactgacgctgaccgcgccggaaatgactgcgctggtgggcggcatgcgtgtactgggtgccaacttcgatggcagcaaaaacggcgtcttcactgaccgcgttggcgtattgagcaatgacttcttcgtgaacttgctggatatgcgttacgagtggaaagcgaccgacgaaagcaaagagctgttcgaaggccgtgaccgtgaaaccggcgaagtgaaatttacggccagccgtgcggatctggtgtttggttctaactccgtcctgcgtgcggtggcggaagtttacgccagtagcgatgcccacgagaagtttgttaaagacttcgtggcggcatgggtgaaagtgatgaacctcgaccgtttcgacctgctgtaatctgaccccgttcagcggctgcttgctggcagtcgctgaacgttctttaccagcgtatagtgggcgaacgaaaactacacactggatctctcatgtctgccgcaggaaagagcaacccactggcaatcagtggcctggttgtgctcacacttatctggagttatagctggattttcatgaagcaagtcaccagttacatcggtgccttcgactttaccgccttacgctgcattttcggcgctctcgttttattcatcgtccttttattacgtggtcgcggaatgcgcccgacaccgtttaaatacaccttagccattgccctgttacaaacctgcgggatggttggtctggcgcagtgggcgttggtcagcggaggtgcggggaaggtggcgatcctgagctataccatgccgttctgggtggtgattttcgccgcgttgtttctcggtgaacgcctgcgacgtgggcaatatttcgcgattctgattgccgctttcggcttatttttggtgttgcagccgtggcaactcgatttctctagcatgaaaagtgccatgctggcaatcctctccggcgtcagttggggggcgagcgcgattgttgctaaacgtctgtatgcccgtcatccgcgcgtggatttattgagcttaacatcctggcagatgctgtatgcggcgctggtgatgagtgtggtcgctttactggtgccgcaacgtgaaattgactggcagcccaccgtgttctgggcgctggcctacagtgcgattctggcgacggcactggcgtggagcttatggttgtttgtattgaaaaacttgcctgccagtattgccagcttaagcacactggccgttcccgtttgcggcgtactcttttcctggtggctgctcggcgagaatccgggggccgttgaaggtagcggtattgtgctgattgtgctggcactggcgctggtgagccgtaagaaaaaagaagccgtcagtgtaaaaaggatctgaattttttcttcatgtggggcgatctcttatttaacaaaataacgataatgccccaccatccgccagttaaacagcacatcttcttcctgcgcgcctgcgccaatgttatgtatcaccagcggcgtaccgtcgcgggcgaagccatcactaaccaccccaatatgtgccagcccgttatccagtcgccaggagacaatatcgcccgcttgatagtcactggggttcttgctggtggggcgtgttttatcatggcggctaaaccaggtttccagattaggcacccgacggtgatcgatgttgctgtccgggcgctttaacttccatttttgcgggtactcagcaaaattcttcgccatatcttcgtgaaccagtttctgcaaatcgaccttctggctgcgcaatgcgcggatcaccacatcggaacatacaccgcgttcttgcggaacatcaccgccaggataagtaagctgcacatacgccggatcgtaaaatagcgtgctgccaatttgctgtctggcaccgtctgcgatggcaaggttggtattggcctggatttgtaccacggttggtggaacggcgggagattttaaggagtggctggtaaatgccgttagcaggctgagcagcgccagactagctttcatctggttcgtccgtgaaaataagagtcacagattcgaccttccgggctaacgattgttctgtagagaaaatgtccagaagcggataaaaaattcctgaacaacgtgggagtttcagattactggcacagagtgccggatgcggagtgaacgccttatccggcctacaaaagcacgcaaattcaatatattgcagagattgcgtaggcctgataagcgtagcgcatcaggcaattttgcgttcaaactcccggacaagccgggagtttggagtaggttattcccactcttgcaggaaacgctgaccgtactggtcggctaccagcagagcggcgtaaacctgatctggcgtcgcgccgccaggcatgttgtgaatggtttcaccttctgcacatgccgcttctgccacaattcgcattttcgccgggacatcttctttaatatccagttgagcgagagttattggcaaacctaccgcatggctaagggcagctacggtttcgatttcctccaccggcgcattttccagaaccagctgcgtcagcgtaccgaatgccactttttcaccgtgataatagtgatgcgcgtccgggatagcggtcaggccgttatgcactgcgtgcgccgcagccagaccaccactttcaaaaccaacaccgctcaaataggtgttcgcttcaatcacgcgctccagcgccggagtcactacatgctgttcggcagcaagcatcgctttttcgccttcttccagcagggtgttgtagcacagttcagccagtgccagcgcagcctgggtgcacttgccgcccgccatggtggtcgcgccgctacgagagcaggcacgcgcttcaaaccaggttgccagcgcatcgccgatacccgccgctaacagacgtgcaggtgcgccagcgacgattttggtgtcgacaatgaccatattcgggttatttggcaacagcagatagcggtcaaactcaccctcatcggtgtagataacagacaatgcgctgcacggtgcatcggtagaggcgatagtcggtgcgatcgctaccggaacacccatgaaatgtgccagtgctttggcagtatcgagggtttttccgccaccgataccgagaattgcgccacactgcgcagtctccgcgatgccacgcagacggtcgatctcattttggctacattcaccgccaaacggcgcaatttctactaccagtccagcatctttaaagcttttctcgacagtggattgagcaaaacctaaaacaaatttgtcacccaccactaaccagcgttctgccagcggcttcaggtattcgcccagacgattaatcacatcagcgccctggatgtatttacccggactttgaataatgcggtccataattgctcctttagagatgagtagtgccaaatgcggcattccagtcgtgttcgaacttctctatagcactctctaccgcaggggtgttgagcatttgttgcgctacatctaagggcagggtgatggattcacatcctgccagtaaacagtccagcgcctgacgcggcgttttaaagctggctgccagcaccatgctttctggcgcgtgcatttctaacagcgtttgcagctcctgaaccgtacgaatgccgtctccgccctgggcatctacgcggttaacatacggagcaacgtattttgcccctgccagtgcggctaataacccttgtgcggcgctatatacagcagtgccaagtgtagtaataccctcttttttcagtattttaattgctgccagaccttcggaagtcaccgggattttcaccacaatacccggaatagcgtcgcgcaggcgcttcgcttcttccaccatcccctgcgcgtcgcggctcatggtctgagcaaacagaatgccctcatcaccaatcgctttttgcagacgcggcagcacttcccatatggactccttgctggcagcgataatgctcgggttagttgtcaccccggcaatggggaatatgcgtgccagacgttcgacttctgcgacgttagcggtgtccagatacagttccatgatgtttccttttacagttccagttcatgttgcagcaggctggcgatagcgtcggcagaggcggcgttaaccagcgcgttacggaattcttcgtgcatgatgcggcgagcgaggcggctgaaaatgcgcatatgctgatcgcccgcagcgtgtttgttcagggttaacataatgatgaattgcgcttcatcatcgccccagcgcaccggcgcttgcagacgcgccacgctgatggtggattgctcaatgtgttcacttttgctgtgtggaatggcaaaactaaagcccagaccggtagagaaaacggcctcgcgcgcccacaagtcggcttccagtttacgcggatagcggcagcggcccgccagcagcaggttatcggtcatgcctttgagcacttcttctttgctgcgccagtcgctttccagtgtgatgcactcggcggtgaccagcggtgcgtcttgttgggtcatgcggaattgcgccagcaggtgttctacttccaggctagtacggcaggccattgcctggttgagcaacttgcggcactcacggctatcaagttgcgccatccgagctttcgccgccggaatacttggtgcgctcatgctgagttcatccagccctaagccgaccagcaacggcagcacggaacctttcgctcccagctcaccgcacagaccaatccatttgccctggcgatgcaccgcttgcacggcgtaatcgagcgcccgcaagaatgccggattcaggctgttgtagtgacgagtaaccttagcgttatcgcgatccaccgccagcagatactgcgtcaggtcattactaccaatactaaagaaatcaatctcttcgcagcattgatcgatgatgaacatcacgctcggcacttccagcatgatgccgagctggattttctcatcaaacggaatgtgttcgttacgtagttgctgtttggcttccgccagtttttctttcacccataagatctcttccatactggagatcatcgggatcatgattttcaggctgccgtgagcggaggcgcggaggatgctccgtagctgcgtggtaaacaagctcgcgtactcttcataaatacgcacggcgcgataaccgaggaacgggtttgcctctgcgggaatgttcagataatcaacgggtttgtcgccgccaatgtccatagtgcgcacaataatgctgcgtccgttggcggattccagcgcctgacaaaaaatgttgtacaactcgctttcgcccggtgcgctggtgcgatccatatagagcatttcagtgcggaacaaaccaacgccttccgcaccattgccgaatgcggcctgcgcttccacggagtgagcgatgttagcggcaatttcaatgcggataccgtcagcggtacgggcttgttgggtcagccagacacgctgttgctcacgcagggcgtcctgtacgcgggcttcttgctgataataacgagctacggcttcccctggctcaaccacaatcgccccggcgttgccgtcgatataaatcgtttgttgctgccacggagtaagggcatcaatatccacaccaaccagcgttggaatgttgaagctacgggcaaggatcaccgtatgactggtggtgccgccgcttttgagcaacaatcctttgaggtgatttttatccagttcgaggaactggctgggggtcagttcatcagccatacaaatggcgggctgcgtcagtttgcccggtgccgggaagcgttgctcaccgtagatttgctggagtaactggaagcagacgtcgcgtacgtccagggcacgttcttgcaggtagctgctgctggaacgggaaaactcttcgcaaaagtgattcgcgctggcaacaattgcttcggcgcagcttaatccggcgctgacgcctgccagtaaatgttcgcgcagggaagtatcgccagccagggatcggtgagcttccagaatcgcgctggtagcaccgtcgctatccagcagacgaaactcaatgtttttcagtaccagcgtcaggccgttttccagtgcggattgctcggcgtcaacgcctttggctgcgggaagattacccagcgcattgagatctaaagaagagatcggcgtcagaatgccgcctgcactaccgctgcacacggtgcgggcgcggataatttgcggattcagattggtcagactaaccggcagtggttccagttcgtcagatttaacttccgccagcggcgcatcgcagtgggggaattcatcgcgcagccattggcttaaacgctggtgcgcttcctgttcgtcggccccggaaatcagtaactggcagttatcgcccgccagcgtatcggtgccaatcagcgcaagggcgcttttggcgttgcccttgcggtcagtgcgcaggttatgccactcaatttgactactaaaagtattacacagcgtttcaacgtggcttgccggacgcgcatgtacgccgttaggtagctcacaaataaattccacaatcagggccattgcctctctcccggtacggttttctgtttacaggataagagcgcacggcaacggcctgccatgtgacaaatctgccaaaagctggacaaatgtaatgtaaccgtcaatttgcgacgcgtctcacaagacgctgttttgcggcatgcttccggtttatcgcaagttatgaggcggatcgcatttttgtactgatattacaaaagtccagtaaatggcctttttatccactgtttgctccgcctgcgattgcctattgtttcctccatcaaaaatatggacatgggctttcgcaagcccgggagcagcttatgaatgagttggtgcagatcctgaaaaatacccgtcagcatttaatgacgggcgttagtcacatgattcccttcgtggtaagcggcggtattttgctggcggtttccgtcatgttgtatggcaaaggcgcagtgccggatgccgtagccgatccaaatctgaaaaaactgtttgatatcggcgttgcgggcttgacgctgatggtgcctttcctcgcagcgtacatcggttattccattgcagagcgttctgcgctggctccgtgcgctatcggtgcctgggttggtaacagctttggtgcgggcttctttggtgcactgatcgccgggattatcggcggcatcgtggtgcattacctgaagaaaattccggtgcataaagttctgcgcagcgtgatgcctatcttcattattcctatcgtcggcacactgattaccgcaggcatcatgatgtggggcttgggcgagcctgtaggggcgttgaccaacagcctgactcagtggcttcaggggatgcagcagggcagcattgttatgctggcggtgatcatgggtctgatgctggcgttcgatatgggcggtccggttaacaaagtggcctatgccttcatgctgatttgcgttgctcagggtgtttataccgtggtggccatcgctgccgtgggtatttgtatcccgccgctggggatggggctggcgacgctgattggtcgtaaaaatttctccgcagaagagcgcgaaaccggcaaagcggcactggtgatgggctgtgttggcgttactgaaggggcgattcctttcgccgctgccgatccgctgcgtgtcattccttccatcatggtcggtagtgtttgtggtgcagtaactgcggcgctggtcggtgcgcagtgctatgcaggctggggtggtctgattgtgctgccggtggttgaaggcaagctgggttatatcgcagcagtggctgtcggagcagtggtgacggctgtttgtgtgaacgtgctgaaaagtctggcgcgtaaaaatgggtctagcactgatgaaaaagaagacgacctggatttggattttgaaattaattaattgaggaacgagccatgacgaaaattattgcagtaaccgcatgtcctagtggtgttgcccatacctatatggcagcagaggcgctggaaagtgccgcgaaagcgaaaggctgggaagtgaaagtagaaacccaggggagtattggtctggaaaatgaactgactgcggaagatgtggcgagcgctgatatggtgattctgaccaaagatatcggcatcaagtttgaagagcgttttgctggcaagaccatcgtgcgcgtcaacatcagcgatgcagtaaaacgtgctgacgccattatgagcaaaattgaagctcacctggcgcaaaccgcttaagttcttctcccgctcgcaagggcgggttcgctttcccacaggagttcctcatgacgaatcgtatctctcgcctcaaaactgcactgtttgccaatacccgtgaaatcagcctggagcgggcgctgctttataccgccagccatcggcaaaccgaaggcgaaccggtgatattgcgccgggcgaaagcaacagcgtatatccttgaacatgttgaaattagcattcgtgatgaagaactgattgccggtaaccgcaccgtaaaaccgcgcgccgggattatgagcccggaaatggacccttactggctgctgaaagagctggatcaattcccgacgcgtccgcaggaccgctttgctatcagcgaagaagataaacgtatctaccgtgaagagttgttcccgtactgggaaaaacgtagcatgaaagatttcatcaacgggcagatgacagatgaagtaaaagccgcgaccaacacgcagattttcagcatcaaccagacggataaaggccaggggcacattattattgattacccacgcctgttgaatcacgggctgggtgagctggtggcacagatgcagcaacattgtcagcaacagccggagaatcacttttatcaggccgcgttgttactgctggaagccagccagaaacacattttgcgttacgccgaactggcggaaacgatggcggcaaactgcacagatgcccagcgtcgcgaagagctgctgactattgcagagatctcccgccataacgcgcaacataagccgcagacgttctggcaggcgtgccagttattctggtacatgaacatcattctgcaatacgaatccaacgccagtagcctaagcttggggcgcttcgaccagtatatgttgccgttctatcagacaagtttaacccagggcgaagatgcggcgttcctgaaagaactgctcgaatctttatgggtgaaatgcaacgacatcgtgctgttgcgctccaccagtagcgcgcgttatttcgccggtttcccgaccggctataccgcactgctcggcgggttaaccgagaacggacgtagcgcggtgaacgtgcttagcttcctttgccttgacgcctatcaaagcgtgcaattaccgcaaccgaacctcggcgtgcgcactaacgccttgatcgacacgccgttcctgatgaaaaccgccgaaaccattcgcttcggtaccggtattccgcaaatctttaacgatgaagtggtggtgccagcgttcctcaaccgtggcgttagcctggaagatgcgcgcgactattccgtagtgggctgtgtggaattatctattcccggcagaacctacggcttgcatgacatcgcgatgtttaatctgctgaaagtgatggaaatctgcctgcatgaaaatgaaggcaatgctgcgctgacttatgaaggtttactggagcagatccgcgccaagatcagccactacatcaccctgatggttgagggcagcaatatttgtgatatcggccatcgcgactgggcacctgtaccgctgctcagtagctttatcagcgattgtctggaaaaaggccgcgatattaccgatggcggcgcgcgttataacttctccggcgtacaggggatcggtatcgccaacctgagcgattctctccatgcgttgaaagggatggtttttgagcaacagcgtttaagttttgacgaattgctgagcgtattaaaagccaacttcgcaacgccagaaggcgaaaaagtccgcgctcgcttaattaaccgcttcgagaaatacggtaacgatatcgacgaggtggataacatcagcgccgaactgttgcgccactactgcaaagaagtggaaaaataccagaacccgcgcggcggctacttcacgccgggaagctataccgtttctgctcacgtcccgttgggaagcgtggttggcgcgacgccagacggtcgttttgccggagaacagctggcagacggcggcttgagtcccatgctgggccaggacgcacaagggccaacagcggtactgaagagtgtcagtaagctcgataacacgctgctgtctaacggtacgttgctgaacgtgaaattcactccggcgaccctggaaggtgaagcaggattacgcaaactggccgacttcttacgggcgtttacccagcttaagttacaacatattcagtttaacgtggtgaacgccgacacgttgcgggaagcgcaacagcgcccacaagattatgccgggctggtggtgcgcgttgccggatacagcgccttctttgtcgaactgagcaaggagatccaggatgacatcatccgccggacagcgcatcagctgtaattaaactgtcgaaggagatccaggatgacaagttccgccggacagcgcatcagctgtaacgttgtggaaacgcgccgcgatgatgtggcgcgcattttcaacattcagcgttatagtctgaatgacggcgagggcattcgtacggtggtcttttttaaaggctgtccgcatctttgcccgtggtgtgctaatccggagagcatctccggcaaaatccagacggtacgcagagaggcgaaatgtctgcactgtgcgaaatgtttgcgtgatgcggatgaatgcccctccggggcgtttgaacggattggtcgcgatatcagccttgacgctctggaacgggaagtgatgaaagatgacattttctttcgcacgtccggcggcggcgtcacgctttctggcggcgaagtgttaatgcaggcggagtttgctacccgttttttacagcgactgcggctgtggggtgtgagttgcgccattgaaactgccggagacgcaccagccagcaagctattaccgctggcgaaattgtgcgatgaagtgttgttcgatttaaaaattatggacgcgactcaggcgcgggatgtggtgaagatgaacctgccacgcgtgctggagaatctgcgtttgctggtgagtgagggcgtcaacgtgatcccgcgtttaccgctgatccctggtttcacgctcagccgggagaatatgcagcaggcgctggatgtactgatcccgctgaatatcaggcagatccatctgttaccgtttcatcagtacggcgaaccgaaataccgcctgctggggaaaacatggagcatgaaagaggtgcctgcgccgagcagtgctgatgtggcaacgatgcgcgaaatggcagaacgggccggacttcaggttaccgtgggaggttaaaatggcatacctggtggcagtaaccgcctgcgtaagcggcgtggcgcatacttatatggcggcggaacggctggaaaagttgtgcctgttagagaagtggggagtcagcattgaaactcagggcgcgctgggaacggagaatcgtttagcggatgaggatatccgccgggcggatgttgctctgttgattacggatatcgagcttgccggtgccgagcgatttgaacattgccgctatgtgcaatgcagcatctacgcattcctgcgtgagccgcagcgggtaatgagcgcggtgcgcaaagtgctttctgcgccgcagcaaacccatcttattctggagtaattattctggagtagtcggtttttctgtcagttggctgtggtactgccggcgatattcgctcgggctgcgttcggtgtttttacgaaacagacggcagaagtagttgctgtcgacaaagccgcaggcgtgcgccacttcttttaccttcaggtcatagcctttcaataacgtcttagcgtgctccagtcgcgtgtgattcaggtattcgttaaaaccaatggcccccgttttttgaaacaggtggctgaggtaatttgggctaatataaaacgcctgtgcaacagattcgcgggtaagcgcggaggcatagcgttcgtcgatataatcgcgaatagcttcaaatagtgcctggctgcgactggcggtctggatttggctgccaagcaaatcgcggcagtggctaagcaggctggcgacgataagccttgccgtttgctgctcctgcggctgcatttgcatttcattgagcgtttgtagcagaaaagaacctatgcgtgggccgcgtcgggcgacgtgttgcttcgccagattttgatattgtttgccatcccattgcacgacgctgaagccgagttgctgtttgccaaacagcacgctaaaggtagtagcgggggcttgccattgtggaaaattccagccaccagcaggaacgtacagcacatcgccgggaactaacgttgctccagcgccggtatcaacaaactcaccttccagcacaatttccagccgtggaaaatcgacctgatacgcaagatcgggcaccgggccgttactgctggcaaagtaaatctggcgcagggacagcgggccgttgatcaggcgggagagcagatagctgacgtcgtgatacatgttattcccttaggtatgtagacgggaaaacagtaactggcattattaaaaaaggccacctgaaaagtgtggcctgaggggagttcgatgtaaacattgcggcagttgtattgccggatgtggcgtaaacgccttatccagcctaccgccgcgatctgtaggccggataagacgcgtcaagcgtcgcatccggcaaatagcgcctggctgataattactgattacccacctgatcgccatagggcagtgtgtcgtaatcgatcagtgcgtttttcttatacgggttaccaatccagcgggtagtttctttgaactgcggattcaccacactacgggttggatcgtaaccgtcgtaagataagcccgccaaatcactccaggtgtggatcagttccgccaggctgtatttacgatcaacatcctggctgaaatcacggggatgagtcgcttgccatttttcactcgtccacagcaggaacggaatggtgtacatatgacgcgtcgggttgtcctcattacgcccctgagttttgtgcggcggcgtgtcgtaaacctcttcaccgtggtcagagaaataaaccaggaaaccgttcgggtttgctgctttaaagtctttaatcaggctggcaaccacatgatcgttatacaggttagcgttgtcataatcgttataactctccagctcttccgcgtttaatcccggcggaacatgatcggtattgccatcaaacttgccctgattttccgggtagcggtatttgtatttgatatgcgtacccagcagatgaacaatgatcagtttcttcggcgcagggtcattcagcacttcctggaacggcttcagcacgttggtgtcgtattcacgcgcactctgcgtacgttgctggttcatgtagtactgcttgtcggtctggcggctaaataccgtcagcatggtattgcgggcggtcatcgtctgctggttggtgatccagaaggttttataacccgcctgtttcatcatgttcatcaggctcggctgcgtcagatacagatccgggttcttttcattggcaaaggtcagcgcctgttgcaggatttcaatggtgtacggacgagacgtaactacgttattaaacacggtcagattcggatcggttttatgcagcgcatccagctccggcgtggtttcacgcggataaccgtacagactcatgcgtccgcgctgggtgctctcgccaatcaccagcactaaagtgcgcggttcgttaccgctttcatctttgaaattagccagtggcggcaaggcattattttcattcagtaactttgttaggctgtttagttgctgacgatactgataatagccggtcaggaattgccacggtgcggcaggctccatacggctggccaggttatccaacgttttctcaaacggcttgtttttgataaacgtattcatggcgatcggatgcagaatcaagccataaagcagggcaaaagagacaacataacgccacggctttggaatatagaccgggcgcaggcgtgtccacagcagaactgccaccgccgtataggccagcgcgataagcacaattttcaggctgaaatactggcttaaatactcgctggcttcgttggtgttggtttcgaacatcacaaacagaacgctctggctgaactcctgaccgtagatgacgtagtagcacagcgccgccagagaggccgcccatagcaccacgccgattactgcggcaataattttaatccgcttcggaaagaggaataccgggatcaaccacaggctactgaataacaggctgtcgcgaatgccgttagtgccactataaccactgatgtaaataatggcctgtagcagagtagagaaaaaccaaaagtagagcagtgcccaacccagggctttccagctaaaaagaggtttagcctggacttctgtggaatgcatagtaagaacctgtcttgaaaaaatatcgccgaatgtaacgacaattccttaaggatatctgaaggtatattcagaatttgaataaaatgcagacagaaatatattgaaaacgagggtgttagaacagaagtatttcagaaaaccctcgcgcaaaagcacgagggtttgcagaagaggaagattagccggtattacgcatacctgccgcaatcccggcaatagtgaccattaacgcttgttcgacgcgaggatccggttcctggccttctttttctgcctggcgggagcggtgcagcaactcggcctgcaatacgttcagcgggtcggtgtaaatattccgtagctgaatagactctgcaatccacggcagatcggccatcagatgggaatcgttggcaatcgccagcaccactttgatgtcttcttcttgcaggttgcgtaactctttacctaacggccacagtgctttgtctaccaggcgttggtcatagtattccgccagccacaggtctgctttggcgaagaccatctccagcatgccgagacgcgtgctgaagaatggccaatcgcggcacatagcctccagctcgctctgtttgccgtcttcgaccactttttgcagcgccgtacctgcacccagccaggcggggagcatcagacggttttgcgtccaggcgaagatccacggaatggcgcgtagactctcgacgccgccggttgggcgacgtttcgccggacgactacccaacggcagtttgcccagttcttgttccggcgtagcggagcggaagtaaggcacaaaatctttgttttcacgtacgtagccgcggtagacatcgcaggagatgacactcagttcatccataatgcgacgccagctctctttcggctccggcggtggcagcaggttggcttccagaatcgccccggtataaaggctcaggctgctgacggtgatttctggcagaccatatttaaagcggatcatctcgccctgttcggttacgcgcaggccgcctttcaggcttcctggcggttgactcagcagcgccgcatgagcaggtgcgccgccgcgaccaatggaaccgccgcgaccgtggaacaacgtcagctcaatacccgctttttcgcaggttttgattaatgcatcctgtgcctgatattgcgcccaggaagctgccatcactcccgcatcttttgcactgtcggaatagccaatcatcaccatctgtttgccctgaatcaggccacgataccagtcaatattgagcagctgggtcatgacatcgttggcgttgttcagatcatcgagggtttcaaacagcggagcaaccggcatcgcaaacccgatacccgcttctttcagcagcaggtggacagccagtacgtcggacggcgttttcgccatgctgatcacgtaggcggcaatggagccttgcggtgcttcggcaatcacctggcaggtatcgagcacttcgcgcgtttcggcgcttggttgccagttgcgcggcagaagcggacgtttggagttcagttcgcggatcaggaacgcctgtttgtcggcctcactccagctttcgtagtcgccgataccgaggtagcgggtcagctcgcccagcgcttcggtatgacgcgtgctctcctgacggatatcaatacggaccagcggtacgccgaaacatttcacgcggcgcagggtgtcgagcagatcgccgttggcgataatacccatgccacacgcctgaagactctggtagcaagcgtagagcggttcccacagttcttcgttttgtgtcagcaggccttctggttttggcagttcttcgcctttcaggcgcgcttccagccatgcctgtgtcgccatcaggcgagaacgcaggtttttcatcagatagcgatacggttctgcggcaccttcttcgccaaccagcgccagcagttcaggggtcgcttcaaccatgctcagttcagaaaccagcacctgaatatctttcaggaacaaatcggtggctttccagcggctgagtagcaggacgtggcgggtgatatcggcagtgacgttcgggttgccgtcgcggtcgccgcccatccagctagtaaaacggaccggaacaaattcgacgggcagtttgtagccgaggttctcttccagttgttcgttcagttcgcgcaggtaatttggtacgccttgccacaggctgttttccactacggcaaagccccatttggcttcatctaccgggcttggacgcagcttacggatttcatcggtatgccaactctgggcgatcaactggcgcaggcgacgcatcagctggttgtgttcgtagtcagcgatatctttgttatcgagctgttttaaacaggcgttcacttccaccattttgtggatcagtgtacgacgggtaatttcggttgggtgagccgtgaggaccagttccaggctcaggctttccactgcttttttgatggtgtcttcgctcagttccggctggtttttcagtttacgcagggtgcgggcgatcacttccgggttgctggcagcttcgcctttcgggctaatgctgtggtattgctcggcggtgttggccaggttcaggaactgactaaacgcacgcgcaacgggcagcagctcgtcgttgctcaaattttgtaaggtggtgagcaactcctggcggttagcatcattgccagcgcgactagatttgctcaacttacggatagtttctacgcgttcaagaatgtgttctcccaacgcatccttgatggtttctcccagcactttgccgagcatactgacattactacgcaatgcggaatattgttcgttcatattaccccagacaccccatcttatcgtttgatagccctgtatccttcacgtcgcattggcgcgaatatgctcgggctttgcttttcgtcgtcttttataaagccacgtaaaagcggtgacgtcaaatgctgcgaaatcgcttcagcaaacgaataaatagcaggaatttacgtcattaaattcacgacgctttaaataagcgtaacttatggaaatgttaaaaaatcgccccaagtaacaccaaaggtgtaggtcggataagatgcgcaagtatcgcatccgacattattgcggcactggagtttggcaacagtgccggatgcggcgcgagcgccttatccggcctacagttgggcatcgtttgagtcactgtcggtcggataagatgcgcaagtatcgcatccgacattattgcggcactggagtttggcaacagtgccggatgcggcgcgagcgccttatccggcctacggttgggcatcgtttgagtcactgtaggtcggataagatgcgcaagcatcgcatccgacattattgcggcactggagtttggcaacagcgccggatgcggcgcgagcgccttatccggcctacgttttaatgccagcaaaaatggtgaattacctgggttatcagttcgcgggtgggcttgataaaccgtgtttccagatattcatcaggttgatgagcctgattaatactgccaggccccaacaccagcgtcgggcataacgtttgaataaacggcgcttcggtacagtagttcaccacttcggtttttgctccgagcaatttctcaaccacttcaaccagttgatgattcggtgggcattcatagccagggatcggcggatgcagctcgtcgaccgtcagacgacccggccagcgttcgctcaccggagccaatgcatcgttgagcaaaccattaagttcattgagtgtcatgccaggcagcggacgaatatccatatgcaactcacagcaagcgcaaatacggttagaagcgtcgccaccgtgaatatgcccgaggttgagcgtagggtatggcacggtaaacgcttcgtagtgataacgttctttcaggttatcgcgcaattgcaaaatatgcccgatggcgtcgtgcattagttcgatagcgttaactccgcgtgctggatcgctggagtgcccgctctggccctgaatacggatggcgttagagatatgacctttatgtgcgcgtaccggttgtagactcgtcggttcgccaatgatggcgcaatccgggcgcagggcggtagtttcggcaaaataacgcgctccggccatactggtttcttcatcagcagtcgccagaatgtagagcggttttttcagtttcgtgacgtcgacatcgcgtagcgcatcaaggataaacgcaaaaaagcctttcatgtcggcggtgcctaagccgtaaagcttgccgtcatgctccgtcagtgtaaacggatcgcgcgtccagcgaccgtcatcaaatggcaccgtatcggtatgccccgccagcaacaagccgccagccccctgtccgatacttgccagcatattgaatttgttgcgagttcctggaacaggctgcacttccacattgaagcccaaatctttaaaccagtccgccagcagagtgattaaatctgcattgctttgatcgagtgcctcttccgtggcgcttatactaggtgtggcaatcagagcgcggtaaatctcgataaatggcggtaatttgtttttcattgttgacacacctctggtcatgatagtatcaatattcatgcagtatttatgaataaaaatacactaacgttgagcgtaataaaacccaccagccgtaaggtgaatgttttacgtttaacctggcaaccagacataagaaggtgaatagccccgatgttgaatacgctgattgtgggtgccagcggctacgctggcgcagagctagtgacctatgtaaatcgccatccgcatatgaacataaccgctttgactgttagtgcgcaaagcaatgatgcgggaaagttaatctccgatttgcatccgcagctaaaaggcatcgttgatctgccgttgcagccgatgagcgatatcagcgagtttagcccaggggtggacgtagtgtttctcgccaccgcccatgaagttagccacgatttagcgccgcagtttcttgaagcgggctgcgtggtgttcgacctttccggcgcgtttcgtgttaacgacgccaccttctatgaaaaatattacggctttacccatcaatacccggaactgttggaacaggcagcctacggtctggcggagtggtgcggtaataaattaaaagaagcgaatttgattgcggtgccgggctgttatccgacggcggcacagctggcgctgaaaccgttgattgatgccgatcttcttgacctcaatcagtggccggtgatcaacgccaccagcggcgtgagcggtgcagggcgtaaagcggccattagtaacagcttttgtgaagttagcctgcaaccgtatggcgtctttactcatcgccatcaaccagagatcgccacacacctcggtgctgacgttatcttcaccccacatctgggcaatttcccgcgcggcattctcgaaaccattacctgccgcctgaaaagcggtgtgacccaggcgcaagtcgcgcaagtgttacagcaggcgtatgcccataaaccgctggtgcggctgtatgacaaaggcgttccggcgctgaaaaatgtcgttgggctgccattttgcgatatcgggtttgccgttcagggcgagcatctgattattgtggcgaccgaagacaacttactgaaaggcgcggcggcacaagcggtacagtgcgccaatattcgtttcggctatgcggaaacgcagtctcttatttaagggtgcaatgatgaatccattaattatcaaactgggcggcgtactgctggatagtgaagaggcgctggaacgtctgtttagcgcactggtgaattatcgtgagagtcatcagcgtccgctggtgattgtgcacggcggcggttgcgtggtggatgagctgatgaaagggctgaatctgccggtgaaaaagaaaaacggcctgcgggtgacgcctgctgatcagatagacattatcaccggagcactggcgggaacggcaaataaaaccctgttggcatgggcgaagaaacatcagattgcggccgtaggtttgtttctcggtgacggcgacagcgtcaaagtgacccagcttgatgaagagttaggtcatgttggactggcgcagccaggtagccctaagcttatcaactccttgctggagaacggttatctgccggtggtcagctccattggcgtaacagacgaagggcaactgatgaacgtcaatgccgaccaggcggcaacggcgctggcggcaacgctgggcgcggatctgattttgctctccgacgtcagcggcattctcgacggcaaagggcaacgcattgccgaaatgaccgccgcgaaagcagaacaactgattgagcagggcattattactgacggcatgatagtgaaagtgaacgcggcgctggatgcggcccgcacgctgggccgtccggtagatatcgcctcctggcgtcatgcggagcagcttccggcactgtttaacggtatgccgatgggtacgcggattttagcttaagttttgttggccggaggcgcagctttccggcattgaatttcaaaataaggaaacagagttatggcactttggggcgggcgttttacccaggcagcagatcaacggttcaaacaattcaacgacagtctgcgctttgattaccgtctggcggagcaggatattgttggctctgtggcctggtccaaagccctggtcacggtaggcgtgttaaccgcagaagagcaggcgcaactggaagaggcgctgaacgtgttgctggaagatgttcgcgccaggccacaacaaatccttgaaagcgacgccgaagatatccatagctgggtggaaggcaaactgatcgacaaagtgggccagttaggcaaaaagctgcataccgggcgtagccgtaatgatcaggtagcgactgacctgaaactgtggtgcaaagataccgttagcgagttactgacggctaaccggcagctgcaaagcgcgctggtggaaaccgcacaaaacaatcaggacgcggtaatgccaggttacactcacctgcaacgcgcccagccggtgacgttcgcgcactggtgcctggcctatgttgagatgctggcgcgtgatgaaagccgtttgcaggatgcgcttaagcgtctggatgtcagcccgctaggctgtggcgcgctggcgggaacggcctatgaaatcgaccgtgaacagttagcaggctggctgggctttgctagcgcgacccgtaacagtctcgacagcgtttctgaccgtgaccatgtgttggaactgctttctgctgccgctatcggcatggtgcatctgagccgttttgctgaagatctgattttctttaacaccggcgaagcggggtttgtggagctttctgaccgcgtgacttccggtagtagtttaatgccgcagaagaaaaacccggatgcgctggagctgattcgcggtaaatgcggccgggtgcagggggcgttaaccggcatgatgatgacgctgaaaggtttgccgctggcttacaacaaagatatgcaggaagacaaagaaggtctgttcgacgcgctcgatacctggctggactgcctgcatatggcggcgctggtgctggacggcattcaggtgaaacgtccacgttgccaggaagcggctcagcagggttacgccaacgccaccgaactggcggattatctggtggcgaaaggcgtaccgttccgcgaggcgcaccatattgttggtgaagcggtggtggaagccattcgtcagggcaaaccgctggaagatctgccgctcagtgagttgcagaaattcagtcaggtgattgacgaagatgtctatccgattctgagcctgcaaagctgcctcgacaagcgtgcggcaaaaggcggcgtcagtccgcagcaggtggcgcaggcgattgcttttgcgcaggctcggttagggtaagaacatttatatgtataaatttgagcctggcttatcgccgggcttttttatggcaaaaaaaagcggatcctggagatccgcaaaagttcacgttggctttagttattcgagttgagaaactctcgaaacgggcagtgacttcaagggttaaaagaggtgccgctccgtttctgtgagcaattatcagtcagaatgcttgatagggataatcgttcattgctattctacctatcgccatgaactatcgtggcgatggaggatggataatgaatattcgtgatcttgagtacctggtggcattggctgaacaccgccattttcggcgtgcggcagattcctgccacgttagccagccgacgcttagcgggcaaattcgtaagctggaagatgagctgggcgtgatgttgctggagcggaccagccgtaaagtgttgttcacccaggcgggaatgctgctggtggatcaggcgcgtaccgtgctgcgtgaggtgaaagtccttaaagagatggcaagccagcagggcgagacgatgtccggaccgctgcacattggtttgattcccacagttggaccgtacctgctaccgcatattatccctatgctgcaccagacctttccaaagctggaaatgtatctgcatgaagcacagacccaccagttactggcgcaactggacagcggcaaactcgattgcgtgatcctcgcgctggtgaaagagagcgaagcattcattgaagtgccgttgtttgatgagccaatgttgctggctatctatgaagatcacccgtgggcgaaccgcgaatgcgtaccgatggccgatctggcaggggaaaaactgctgatgctggaagatggtcactgtttgcgcgatcaggcaatgggtttctgttttgaagccggggcggatgaagatacacacttccgcgcgaccagcctggaaactctgcgcaacatggtggcggcaggtagcgggatcactttactgccagcgctggctgtgccgccggagcgcaaacgcgatggggttgtttatctgccgtgcattaagccggaaccacgccgcactattggcctggtttatcgtcctggcagtccgctgcgcagccgctatgagcagctggcagaggccatccgcgcaagaatggatggccatttcgataaagttttaaaacaggcggtttaaaccgtttaacgcagctacccgataggcttccgccatcgtcgggtagttaaaggtggtgttgacgaagtactcaatagtgttgccgccacctttctgttccataatcgcctgaccgatatgaataatttcggcagcgcgctcgccaaagcagtgaatacccagaatctcttttgtttcccgatggaacaaaattttcagcgtgcccacgttcatgccgacgatttgtgcgcgtgccagatgtttaaactgggcgcggcccacttcatatggcactttcattgcggtcagctgctgttcggttttgcccacagagctgatttccgggatggtgtaaataccggtagggatatcttcaatcagatgtgcggtggcttcgccttttaccagcgcctgcgcggcaatgcgcccctggtcataggccgcgctcgccaggctcggataaccaatcacgtcgcccaccgcgtaaacgtgtggctgtgcggtctgatacatgctgttgaccttcagctgtccgcggctgtcagtttctagcccaatgttctgtaacgccaggctatcggtattaccggtgcgaccgttggcatagagcaggcagtcagctttcagttttttaccgctcttcagatgcatgatcacaccatcgtcacagccttcgatcttctcgtactcttcgttgtgacgaatcactacgccactgttccagaagtgataggagagagaatcactcatctcttgatcgagaaatgccagcaggcgatcgcgggtgttgatcagatccacttttacatccataccgcggaagatgctcgcatattcacagccgatcactccagcaccatagataagtacatggcgcggttcgtggtgcatgctgagaatactgtcgctgtcgtaaatgcgtggatgggtgaaatcaacatctgttggatgatatggacgagagccgcaggcaataacaaatttttcagcggttagtgtttcaacgctgccgtccgggcaatccagcgccaacgtatgctcgtcaacaaagcgagcgtttccctgcaatatttcacagtgattacgttcgtaaaatccctgacgcatgcgcgtttgttgattaatcacgttatcggcatggttaaggatatcggcaaaagaagagcggagcagtcgggaatggtcgctgtaaagtgggttttgattgaattctataatgcggctgacggcgtgacggagagctttgctcgggatggtgccccagtgggtgcaaccgccgccaacattttgataacgctcgataactgcgacgcgcgcaccttgcttaaccaggcccattgcagcgccttcgccgccggggccggaacctattactatggcatcgtaatcgtaggaatgtggcatggtagggcttacctgttcttatacataaaagcaacagaatggtaacattttatcgcgggtaagccaattgatccccgtcatttatctggctatatcctgagcggcctttgctttgtctgtttcttacttttgccctgacgttttattggatttttatcgacgatactctccgtttaagcggcaggtttccgctgtacgtaaaagaaccggccaaagaattgcagtaaatatgttttattgcgttaccgttcattcacaatactggagcaatccagtatgttcattctctggtatagtgccagcagtacttttggcaaggatagtgacatcgtgatgggcgtaagagcgcaacaaaaagaaaaaacccgccgtagcctggtggaagccgcatttagccaattaagtgctgaacgcagcttcgccagcctgagtttgcgtgaagtggcgcgtgaagcgggcattgctcccacctctttttatcggcatttccgcgacgtagacgaactgggtctgaccatggttgatgagagcggtttaatgctacgccaactcatgcgccaggcgcgtcagcgtatcgccaaaggcgggagtgtgatccgcaccagcgtctccacatttatggagttcatcggtaataatcctaacgccttccggttattattgcgggaacgctccggcacctccgctgcgtttcgtgccgccgttgcgcgtgaaattcagcacttcattgcggaacttgcggactatctggaactcgaaaaccatatgccgcgtgcgtttactgaagcgcaagccgaagcaatggtgacaattgtcttcagtgcgggtgccgaggcgttggacgtcggcgtcgaacaacgtcggcaattagaagagcgactggtactgcaactgcgaatgattagcaaaggggcttattactggtatcgccgtgaacaagagaaaaccgcaattattccgggaaatgtgaaggacgagtaatgaaacaagcaaatcaagatagaggtacgctgctgctggcgttagttgctggcttaagcattaatggtactttcgcagcgctgtttagctccattgtgccattttctgtattcccgattatttccctggtgctgacggtttactgcctgcatcaacgttatcttaatcgcactatgccggtaggcttgccgggtctggcagctgcctgttttattctcggcgtactgctgtacagcacggtagttcgtgcggaatatccggatatcggctctaacttcttcccggcagtactctccgtcattatggtgttctggattggcgcgaagatgcgtaaccgtaagcaggaagttgctgagtaatcggtattatgccggatgctggcgcatccggcatgggttttacttcgcggtcagtaatacgccgcactccatatggtgcgtgtaggggaactgatcaaacagagccagacgttcgaccttgtgcgtctggcttaatgtttccagattcttgcataacgtttccgggttacaggagatgtacaaaatacgcggatacgcctgcaccattttctcggtttcactgtccagaccgctgcgcggagggtcgacaaaaatggtttcgcactgataactctttaagtcgatcccttgcaggcggttaaactcgcgcacaccattcatcgcctgagtaaattcttctgccgccatacgaataatttgtacgttatcaatatggttagctgcgatgttgtattgcgcagcagcaacgctcggcttagcgatttcggtggctaatacccgatcaaaattacgcgccagcgctaaactaaagttaccgttgccgcagtacagctccagtaaatcgcctttactgcctttggttacgtccagcgcccattccagcatctgaatattcatcgccgcgttcggctgggtaaagctgttttctacctgacggtagatcatctctttccctgcgaccggcagacgttcatcgatgtaatcctgatccagctcgattttggttttcgttgcccgaccaatcagatgcacattcagattctgcgcgcgcagtgcatcgcgcagggcctccgcttcctgacgccactcatcatccagcttcttatggtatagcagggaaaccaccgcctgattactcagtgtagtgaggtaatcaatctggaacaacttgtggcgcagaacgggattattacgcacacccgcaatcatcgccgtcatcaactggttgataagttcactggcggcggggaagctatccacgcggatgcggcttttggtttgttgatcgaaaatgatgtgatacaggtcatcgccatcgtgccagatgcggaactccgcgcgcatccggtaatgactgaccgggctgcgaaacacttccggaaccaggtcagaaaacggtgccatcatactttgcaaacgtaccactttttcggctaactgcgcttcatactgttctgttggaaggtgttcgggggtcatgatgtatcctgaaaaattaaagtacgcggcgattgtagggattgctcatcagatgtccagatcttgatgaattcctatttgtgagctacgtctggacagtaacttgttacaacctgtagcatccacttgccggtcctgtgagttaatagggaatccagtgcgaatctggagctgacgcgcagcggtaaggaaaggtgcgatgattgcgttatgcggacactgccattcggtgggaagtcatcatctcttagtatcttagatacccctccaagcccgaagacctgccggccaacgtcgcatctggttctcatcatcgcgtaatattgatgaaacctgcggcatccttcttctattgtggatgctttacaatgattaaaaaagctagcctgctgacggcgtgttccgtcacggcattttccgcttgggcacaggataccagcccggatactctcgtcgttactgctaaccgttttgaacagccgcgcagcactgtgcttgcaccaaccaccgttgtgacccgtcaggatatcgaccgctggcagagcaccagcgtcaatgatgtgctgcgccgtcttccgggcgtcgatatcacccaaaacggcggtagtggtcagctcagttctatttttattcgcggtacaaatgccagtcatgtgttggtgttaattgatggcgtacgcctgaatctggcgggggtgagtggttctgccgaccttagccagttccctattgcgcttgtccagcgtgttgaatatatccgtgggccgcgctccgctgtttatggttccgatgcaataggcggggtggtgaatatcatcacgacgcgcgatgaacccggaacggaaattagtgcagggtggggaagcaatagttatcagaactatgatgtctctacgcagcaacaactgggggataagacacgggtaacgctgttgggcgattatgcccatactcatggttatgatgttgttgcctatggtaataccggaacgcaagcgcagacagataacgatggttttttaagtaaaacgctttatggcgcgctggagcataactttactgatgcctggagcggctttgtgcgcggctatggctatgataaccgtaccaattatgacgcgtattattctcccggtagtccgttgctcgatacccgtaaactctatagccaaagttgggacgccgggctgcgctataacggcgaactgattaaaagtcaactcattaccagctatagccatagcaaagattacaactacgatccccattatggtcgttatgatagcagcgcgacgctcgatgagatgaagcaatacaccgtccagtgggcaaacaatgtcatcgttggtcacggtagtattggtgcgggtgtcgactggcagaaacagactacgacgccgggtacaggttatgttgaggatggatatgatcaacgtaataccggcatctatctgaccgggctgcaacaagtcggcgattttacctttgaaggcgcagcacgcagtgacgataacagtcagtttggtcgtcatggaacctggcaaaccagcgccggttgggaattcatcgaaggttatcgcttcattgcttcctacgggacatcttataaggcaccaaatctggggcaactgtatggcttctacggaaatccgaatctggacccggagaaaagcaaacagtgggaaggcgcgtttgaaggcttaaccgctggggtgaactggcgtatttccggatatcgtaacgatgtcagtgacttgatcgattatgatgatcacaccctgaaatattacaacgaagggaaagcgcggattaagggcgtcgaggcgaccgccaattttgataccggaccactgacgcatactgtgagttatgattatgtcgatgcgcgcaatgcgattaccgacacgccgttgttacgccgtgctaaacagcaggtgaaataccagctcgactggcagttgtatgacttcgactggggtattacttatcagtatttaggcactcgctatgataaggattacagttcttatccttatcaaaccgttaaaatgggcggtgtgagcttgtgggatcttgcggttgcgtatccggtcacctctcacctgacagttcgtggtaaaatagccaacctgttcgacaaagattatgagacagtctatggctaccaaactgcaggacgggaatacaccttgtctggcagctacaccttctgaaccacgtcccaccgtgctggtgtttgactccggcgtcggtgggttgagcgtctatgacgagatccggcatctcttaccggatctccattacatttatgctttcgataacgtcgctttcccgtatggcgaaaaaagcgaagcgtttattgttgagcgagtggtggcaattgtcaccgcggtgcaagaacgttatccccttgcgctggctgtggtcgcttgcaacactgccagtaccgttagtcttcctgcattacgcgaaaagttcgacttcccggttgttggtgtcgtgccggcgattaaacctgctgcacgtctgacggcaaatggcattgtcggattactggcaacccgcggaacagttaaacgttcttatactcatgagctgatcgcgcgtttcgctaatgaatgccagatagaaatgctgggcagcgcagagatggttgagttggctgaagcgaagctacatggcgaagatgtttctctggatgcactaaaacgtatcctacgcccgtggttaagaatgaaagagccgccagataccgttgtattgggttgcacccatttccctctactacaagaagaactgttacaagtgctgccagagggaacccggctggtggattctggcgcagcgattgctcgccgaacggcctggttgttagaacatgaagccccggatgcaaaatctgccgatgcgaatattgccttttgtatggcaatgacgccaggagctgaacaattattgcccgttttacagcgttacggcttcgaaacgctcgaaaaactggcagttttaggctgatttggttgaatgttgcgcggtcagaaaattattttaaatttcctcttgtcaggccggaataactccctataatgcgccaccactgacacggaacaacggcaaacacgccgccgggtcagcggggttctcctgagaactccggcagagaaagcaaaaataaatgcttgactctgtagcgggaaggcgtattatgcacaccccgcgccgctgagaaaaagcgaagcggcactgctctttaacaatttatcagacaatctgtgtgggcactcgaagatacggattcttaacgtcgcaagacgaaaaatgaataccaagtctcaagagtgaacacgtaattcattacgaagtttaattctttgagcgtcaaacttttaaattgaagagtttgatcatggctcagattgaacgctggcggcaggcctaacacatgcaagtcgaacggtaacaggaagaagcttgcttctttgctgacgagtggcggacgggtgagtaatgtctgggaaactgcctgatggagggggataactactggaaacggtagctaataccgcataacgtcgcaagaccaaagagggggaccttcgggcctcttgccatcggatgtgcccagatgggattagctagtaggtggggtaacggctcacctaggcgacgatccctagctggtctgagaggatgaccagccacactggaactgagacacggtccagactcctacgggaggcagcagtggggaatattgcacaatgggcgcaagcctgatgcagccatgccgcgtgtatgaagaaggccttcgggttgtaaagtactttcagcggggaggaagggagtaaagttaatacctttgctcattgacgttacccgcagaagaagcaccggctaactccgtgccagcagccgcggtaatacggagggtgcaagcgttaatcggaattactgggcgtaaagcgcacgcaggcggtttgttaagtcagatgtgaaatccccgggctcaacctgggaactgcatctgatactggcaagcttgagtctcgtagaggggggtagaattccaggtgtagcggtgaaatgcgtagagatctggaggaataccggtggcgaaggcggccccctggacgaagactgacgctcaggtgcgaaagcgtggggagcaaacaggattagataccctggtagtccacgccgtaaacgatgtcgacttggaggttgtgcccttgaggcgtggcttccggagctaacgcgttaagtcgaccgcctggggagtacggccgcaaggttaaaactcaaatgaattgacgggggcccgcacaagcggtggagcatgtggtttaattcgatgcaacgcgaagaaccttacctggtcttgacatccacggaagttttcagagatgagaatgtgccttcgggaaccgtgagacaggtgctgcatggctgtcgtcagctcgtgttgtgaaatgttgggttaagtcccgcaacgagcgcaacccttatcctttgttgccagcggtccggccgggaactcaaaggagactgccagtgataaactggaggaaggtggggatgacgtcaagtcatcatggcccttacgaccagggctacacacgtgctacaatggcgcatacaaagagaagcgacctcgcgagagcaagcggacctcataaagtgcgtcgtagtccggattggagtctgcaactcgactccatgaagtcggaatcgctagtaatcgtggatcagaatgccacggtgaatacgttcccgggccttgtacacaccgcccgtcacaccatgggagtgggttgcaaaagaagtaggtagcttaaccttcgggagggcgcttaccactttgtgattcatgactggggtgaagtcgtaacaaggtaaccgtaggggaacctgcggttggatcacctccttaccttaaagaagcgtactttgtagtgctcacacagattgtctgatagaaagtgaaaagcaaggcgtttacgcgttgggagtgaggctgaagagaataaggccgttcgctttctattaatgaaagctcaccctacacgaaaatatcacgcaacgcgtgataagcaattttcgtgtccccttcgtctagaggcccaggacaccgccctttcacggcggtaacaggggttcgaatcccctaggggacgccacttgctggtttgtgagtgaaagtcgccgaccttaatatctcaaaactcatcttcgggtgatgtttgagatatttgctctttaaaaatctggatcaagctgaaaattgaaacactgaacaacgagagttgttcgtgagtctctcaaattttcgcaacacgatgatgaatcgaaagaaacatcttcgggttgtgaggttaagcgactaagcgtacacggtggatgccctggcagtcagaggcgatgaaggacgtgctaatctgcgataagcgtcggtaaggtgatatgaaccgttataaccggcgatttccgaatggggaaacccagtgtgtttcgacacactatcattaactgaatccataggttaatgaggcgaaccgggggaactgaaacatctaagtaccccgaggaaaagaaatcaaccgagattcccccagtagcggcgagcgaacggggagcagcccagagcctgaatcagtgtgtgtgttagtggaagcgtctggaaaggcgcgcgatacagggtgacagccccgtacacaaaaatgcacatgctgtgagctcgatgagtagggcgggacacgtggtatcctgtctgaatatggggggaccatcctccaaggctaaatactcctgactgaccgatagtgaaccagtaccgtgagggaaaggcgaaaagaaccccggcgaggggagtgaaaaagaacctgaaaccgtgtacgtacaagcagtgggagcacgcttaggcgtgtgactgcgtaccttttgtataatgggtcagcgacttatattctgtagcaaggttaaccgaataggggagccgaagggaaaccgagtcttaactgggcgttaagttgcagggtatagacccgaaacccggtgatctagccatgggcaggttgaaggttgggtaacactaactggaggaccgaaccgactaatgttgaaaaattagcggatgacttgtggctgggggtgaaaggccaatcaaaccgggagatagctggttctccccgaaagctatttaggtagcgcctcgtgaattcatctccgggggtagagcactgtttcggcaagggggtcatcccgacttaccaacccgatgcaaactgcgaataccggagaatgttatcacgggagacacacggcgggtgctaacgtccgtcgtgaagagggaaacaacccagaccgccagctaaggtcccaaagtcatggttaagtgggaaacgatgtgggaaggcccagacagccaggatgttggcttagaagcagccatcatttaaagaaagcgtaatagctcactggtcgagtcggcctgcgcggaagatgtaacggggctaaaccatgcaccgaagctgcggcagcgacgcttatgcgttgttgggtaggggagcgttctgtaagcctgcgaaggtgtgctgtgaggcatgctggaggtatcagaagtgcgaatgctgacataagtaacgataaagcgggtgaaaagcccgctcgccggaagaccaagggttcctgtccaacgttaatcggggcagggtgagtcgacccctaaggcgaggccgaaaggcgtagtcgatgggaaacaggttaatattcctgtacttggtgttactgcgaaggggggacggagaaggctatgttggccgggcgacggttgtcccggtttaagcgtgtaggctggttttccaggcaaatccggaaaatcaaggctgaggcgtgatgacgaggcactacggtgctgaagcaacaaatgccctgcttccaggaaaagcctctaagcatcaggtaacatcaaatcgtaccccaaaccgacacaggtggtcaggtagagaataccaaggcgcttgagagaactcgggtgaaggaactaggcaaaatggtgccgtaacttcgggagaaggcacgctgatatgtaggtgaggtccctcgcggatggagctgaaatcagtcgaagataccagctggctgcaactgtttattaaaaacacagcactgtgcaaacacgaaagtggacgtatacggtgtgacgcctgcccggtgccggaaggttaattgatggggttagcgcaagcgaagctcttgatcgaagccccggtaaacggcggccgtaactataacggtcctaaggtagcgaaattccttgtcgggtaagttccgacctgcacgaatggcgtaatgatggccaggctgtctccacccgagactcagtgaaattgaactcgctgtgaagatgcagtgtacccgcggcaagacggaaagaccccgtgaacctttactatagcttgacactgaacattgagccttgatgtgtaggataggtgggaggctttgaagtgtggacgccagtctgcatggagccgaccttgaaataccaccctttaatgtttgatgttctaacgttgacccgtaatccgggttgcggacagtgtctggtgggtagtttgactggggcggtctcctcctaaagagtaacggaggagcacgaaggttggctaatcctggtcggacatcaggaggttagtgcaatggcataagccagcttgactgcgagcgtgacggcgcgagcaggtgcgaaagcaggtcatagtgatccggtggttctgaatggaagggccatcgctcaacggataaaaggtactccggggataacaggctgataccgcccaagagttcatatcgacggcggtgtttggcacctcgatgtcggctcatcacatcctggggctgaagtaggtcccaagggtatggctgttcgccatttaaagtggtacgcgagctgggtttagaacgtcgtgagacagttcggtccctatctgccgtgggcgctggagaactgaggggggctgctcctagtacgagaggaccggagtggacgcatcactggtgttcgggttgtcatgccaatggcactgcccggtagctaaatgcggaagagataagtgctgaaagcatctaagcacgaaacttgccccgagatgagttctccctgaccctttaagggtcctgaaggaacgttgaagacgacgacgttgataggccgggtgtgtaagcgcagcgatgcgttgagctaaccggtactaatgaaccgtgaggcttaaccttacaacgccgaagctgttttggcggatgagagaagattttcagcctgatacagattaaatcagaacgcagaagcggtctgataaaacagaatttgcctggcggcagtagcgcggtggtcccacctgaccccatgccgaactcagaagtgaaacgccgtagcgccgatggtagtgtggggtctccccatgcgagagtagggaactgccaggcatcaaataaaacgaaaggctcagtcgaaagactgggcctttcgttttatctgttgtttgtcggtgaacgctctcctgagtaggacaaatccgccgggagcggatttgaacgttgcgaagcaacggcccggagggtggcgggcaggacgcccgccataaactgccaggcatcaaattaagcagaaggccatcctgacggatggcctttttgcgtttctacaaactcttcctgtcgtcatatctacaagccatccccccacagatacggtaaactagcctcgtttttgcatcaggaaagcagctatgaaccactccttaaaaccctggaacacatttggcattgatcataatgctcagcacattgtatgtgccgaagacgaacaacaattactcaatgcctggcagtatgcaaccgcagaaggacaacccgttcttattctgggtgaaggaagtaatgtactttttctggaggactatcgcggcacggtgatcatcaaccggatcaaaggtatcgaaattcatgatgaacctgatgcgtggtatttacatgtaggagccggagaaaactggcatcgtctggtaaaatacactttgcaggaaggtatgcctggtctggaaaatctggcattaattcctggttgtgtcggcagtagtcctatccagaatattggtgcttatggcgtagaattacagcgagtttgcgcttatgttgattctgttgaactggcgacaggcaagcaagtgcgcttaactgccaaagagtgccgttttggctatcgcgacagtatttttaaacatgaataccaggaccgcttcgctattgtagccgtaggtctgcgtctgccaaaagagtggcaacctgtactaacgtatggtgacttaactcgtctggatcctacaacagtaacgccacagcaagtatttaatgcggtgtgtcatatgcgcaccaccaaactccctgatccaaaagtgaatggcaatgccggtagtttcttcaaaaaccctgttgtatctgccgaaacggctaaagcattactgagtcaatttccaacagcaccaaattacccccaggcggatggtagtgtaaaactggcagcaggttggcttatcgatcagtgccagctaaaagggatgcaaataggtggggctgcggtgcaccgtcaacaggcgttagttctcattaatgaagacaatgcaaaaagcgaagatgttgtacagctggcgcatcatgtaagacagaaagttggtgaaaaatttaatgtctggcttgagcctgaagtccgctttattggtgcaagtggtgaagtgagcgcagtggagacaattagttgaaataaagcgcagtggagacaatttcatgaaggataacaccgtgccactgaaattgattgccctgttagcgaacggtgaatttcactctggcgagcagttgggtgaaacgctgggaatgagccgggcggctattaataaacacattcagacactgcgtgactggggcgttgatgtctttaccgttccgggtaaaggatacagcctgcctgagcctatccagttacttaatgctaaacagatattgggtcagctggatggcggtagtgtagccgtgctgccagtgattgactccacgaatcagtaccttcttgatcgtatcggagagcttaaaagcggcgatgcttgcattgcagaataccagcaggctggccgtggtcgccggggtcggaaatggtttagcccttttggcgcaaacttatatttgagcatgttctggcgtctggaacaaggcccggcggcggcgattggtttaagtctggttatcggtatcgtgatggcggaagtattacgcaagctgggtgcagataaagttcgtgttaaatggcctaatgacctctatctgcaggatcgcaagctggcaggcattctggtggagctgactggcaaaactggcgatgcggcgcaaatagtcattggagccgggatcaacatggcaatgcgccgtgttgaagagagtgtcgttaatcaggggtggatcacgctgcaggaagcggggatcaatctcgatcgtaatacgttggcggccatgctaatacgtgaattacgtgctgcgttggaactcttcgaacaagaaggattggcaccttatctgagccgctgggaaaagctggataattttattaatcgcccagtgaaacttatcattggtgataaagaaatatttggcattagtcgcggaatagacaaacagggggctttattacttgagcaggatggaataataaaaccctggatgggcggtgaaatatccctgcgtagtgcagaaaaataagaaaggggagtattcgctcccctgcaaattatttgcgtagtctgacctcttctaccgcatgattagcacttttcgtcaggattaaactggcgcgctcacgagtaggtagaatattttgctttaagttcagccagttgatctctttccacaatgtcatggcagtcttaatcgcttcttctttagttaatttcgcgtagttatgaaaataggaatccgggtcggtaaaagccccttcgcggaatttcagaaaacggttgatataccatgtctgaagtaagtcttccggtgcatcaacatatatgctaaaatcgacaaaatcagaaacaaatacatgatgtggatcgtgtggataatccatcccgctctgtaagacatttaacccttcaagaattaaaatatcaggctgaacaaccgttttatctccatccgggatcacatcataaataagatgactgtaaacaggtgctgtaacgtttggcacgccggatttgagatcggaaacaaacttcaccaggcgatgcatatcatagctttccgggaagcctttcttcttcatcagaccacgttctttcagaacctgattagggtgaaggaagccatctgtagtgatcagttcaacacgacgatgttccggccaacggcttaatagcgcctgcaatacacgggcggttgtacttttccccaccgcgacactgccagcaatactgataatgtaaggaatgcgttgcccgttggtaccaagaaactgttccagaactgcctgacggcgcagattgctgcttatatagaagttcagcaaacgactcaaaggtaaatagatctcggcaacttcttctaagctgagatcttcattaatacctttgagacgggcgatctcatcttcgcttaacgtcataggtacggaatcacgcagagctgcccactggttgcggtcaaactgtaggtaaggcgtcattaacgtttgctcttttatactcataagcatgtttctggcggtcatagctctatcggcaaagcgatatttgccatggcgcgtcacagttctgttgaatgggttaatgggcaggagggtaacaccagatggggaggaataataagaaaaaatctctgccaggaagctatcgttgaaaagcaatgtgacagatattccatctgataaaaagaattatggtttagcaggagcgcattgttgagcacaatgatgttgaaaaagtgtgctaatctgccctccgttcggctgtttcttcatcgtgtcgcataaaatgtgaccaataaaacaaattatgcaattttttagttgcatgaactcgcatgtctccatagaatgcgcgctacttgatgccgacttagctcagtaggtagagcaactgacttgtaatcagtaggtcaccagttcgattccggtagtcggcaccatcaagtccggtggggttcccgagcggccaaagggagcagactgtaaatctgccgtcacagacttcgaaggttcgaatccttcccccaccaccaatttcggccacgcgatggcgtagcccgagacgataagttcgcttaccggctcgaataaagagagcttctctcgatattcagtgcagaatgaaaatcaggtagccgagttccaggatgcgggcatcgtataatggctattacctcagccttccaagctgatgatgcgggttcgattcccgctgcccgctccaagatgtgctgatatagctcagttggtagagcgcacccttggtaagggtgaggtcggcagttcgaatctgcctatcagcaccacttcttttctcctccctgttttttccttctgtttattgcattcaacaagtcgggcatgttgcctggttgatgtggtgatatcaccgatttatccgtgtcttagagggacaatcgatgtctaaagaaaagtttgaacgtacaaaaccgcacgttaacgtcggtactatcggccacgttgaccatggtaaaacaacgctgaccgctgcaatcactaccgtactggctaaaacctacggcggtgctgctcgcgcattcgaccagatcgataacgcgccggaagaaaaagctcgtggtatcaccatcaacacttctcacgttgaatacgacaccccgacccgtcactacgcacacgtagactgcccggggcacgccgactatgttaaaaacatgatcaccggtgctgcgcagatggacggcgcgatcctggtagttgctgcgactgacggcccgatgccgcagactcgtgagcacatcctgctgggtcgtcaggtaggcgttccgtacatcatcgtgttcctgaacaaatgcgacatggttgatgacgaagagctgctggaactggttgaaatggaagttcgtgaacttctgtctcagtacgacttcccgggcgacgacactccgatcgttcgtggttctgctctgaaagcgctggaaggcgacgcagagtgggaagcgaaaatcctggaactggctggcttcctggattcttacattccggaaccagagcgtgcgattgacaagccgttcctgctgccgatcgaagacgtattctccatctccggtcgtggtaccgttgttaccggtcgtgtagaacgcggtatcatcaaagttggtgaagaagttgaaatcgttggtatcaaagagactcagaagtctacctgtactggcgttgaaatgttccgcaaactgctggacgaaggccgtgctggtgagaacgtaggtgttctgctgcgtggtatcaaacgtgaagaaatcgaacgtggtcaggtactggctaagccgggcaccatcaagccgcacaccaagttcgaatctgaagtgtacattctgtccaaagatgaaggcggccgtcatactccgttcttcaaaggctaccgtccgcagttctacttccgtactactgacgtgactggtaccatcgaactgccggaaggcgtagagatggtaatgccgggcgacaacatcaaaatggttgttaccctgatccacccgatcgcgatggacgacggtctgcgtttcgcaatccgtgaaggcggccgtaccgttggcgcgggcgttgtagcaaaagttctgagctaattgccgataacatttgacgcaatgcgcactaaaagggcatcatttgatgccctttttgcacgctttcgtaccagaacctggctcatcagtgattttctttgtcataatcattgctgagacaggctctgttgagggcgtataatccgaaaagctaatacgcgtttcgatttggtttgcctcgcgatcgcggggtgaaaatgtttgtagaaaacttctgacaggttggtttatgagtgcgaataccgaagctcaaggaagcgggcgcggcctggaagcgatgaagtgggtcgttgtggtggcattgctcctggtggcgattgtcggcaactatctttatcgcgacattatgctgccgctgcgtgcgctggccgtagtaattctgattgctgcagcgggtggtgtcgcgctgttaacgacaaaaggtaaagctaccgttgcttttgcccgtgaagcgcgtaccgaagtccgtaaggtcatttggccgactcgccaggaaacattgcacaccacgctgattgtggctgcggttaccgcagtaatgagtctgatcctgtggggactggatggtattctggttcgcctggtatcctttatcactggcctgaggttctgagatgtctgaagctcctaaaaagcgctggtacgtcgttcaggcgttttccggttttgaaggccgcgtagcaacgagcctgcgtgagcatatcaaattacacaacatggaagatttgtttggtgaagtcatggtaccaaccgaagaagtggttgaaatccgtggcggtcagcgtcgcaaaagcgaacgtaaattcttccctggctacgtcctcgttcagatggtgatgaacgacgcgagctggcacctggtgcgcagcgtaccgcgtgtgatgggcttcatcggcggtacttccgatcgtcctgcgccaatcagcgataaagaagtcgatgcgattatgaaccgcctgcagcaggttggtgataagccgcgtccgaaaacgctgtttgaaccgggtgaaatggtccgtgttaatgatggtccgttcgctgacttcaacggtgttgttgaagaagtggattacgagaaatctcgtctgaaagtgtctgtttctatcttcggtcgtgcgaccccggtagagctggacttcagccaggttgaaaaagcctaacccagcgatcaaaaaagcggcgatttaatcgttgcacaaggcgtgagattggaatacaatttcgcgccttttgtttttatgggccttgcccgtaaaacgattttttatatcacggggagcctctcagaggcgttattacccaacttgaggaatttataatggctaagaaagtacaagcctatgtcaagctgcaggttgcagctggtatggctaacccgagtccgccagtaggtccggctctgggtcagcagggcgtaaacatcatggaattctgcaaagcgttcaacgcaaaaactgattccatcgaaaaaggtctgccgattccggtagtaatcaccgtttacgctgaccgttctttcactttcgttaccaagaccccgccggcagcagttctgctgaaaaaagcggctggtatcaagtctggttccggtaagccgaacaaagacaaagtgggtaaaatttcccgcgctcagctgcaggaaatcgcgcagaccaaagctgccgacatgactggtgccgacattgaagcgatgactcgctccatcgaaggtactgcacgttccatgggcctggtagtggaggactaagaaatggctaaactgaccaagcgcatgcgtgttatccgcgagaaagttgatgcaaccaaacagtacgacatcaacgaagctatcgcactgctgaaagagctggcgactgctaaattcgtagaaagcgtggacgtagctgttaacctcggcatcgacgctcgtaaatctgaccagaacgtacgtggtgcaactgtactgccgcacggtactggccgttccgttcgcgtagccgtatttacccaaggtgcaaacgctgaagctgctaaagctgcaggcgcagaactggtaggtatggaagatctggctgaccagatcaagaaaggcgaaatgaactttgacgttgttattgcttctccggatgcaatgcgcgttgttggccagctgggccaggttctgggtccgcgcggcctgatgccaaacccgaaagtgggtactgtaacaccgaacgttgctgaagcggttaaaaacgctaaagctggccaggttcgttaccgtaacgacaaaaacggcatcatccacaccaccatcggtaaagtggactttgacgctgacaaactgaaagaaaacctggaagctctgctggttgcgctgaaaaaagcaaaaccgactcaggcgaaaggcgtgtacatcaagaaagttagcatctccaccaccatgggtgcaggtgttgcagttgaccaggctggcctgagcgcttctgtaaactaatgcctttacgtgggcggtgattttgtctacaatcttacccccacgtataatgcttaatgcagacgtatatccgagatattcgggttgtggcaaggcggcaactgagtgagtcgccaggagcatagctaactatgtgactggtgcgaatgaaggaagccaacgccgtcacaagctgaatagcgacggatagaaaagatttgttcgttggagcctggcctatccaggcctccgtcgaagaccgcaggagtttcgcaagaaacttaatcccctgcgtagacggtgacagaacgctaagattattcttttatattctggcttgtttctgctcaccgtaattaagacgctctctccgtttggaggagtgaagtgagttccagagattttctctggcaaacatccaggagcaaagctaatggctttaaatcttcaagacaaacaagcgattgttgctgaagtcagcgaagtagccaaaggcgcgctgtctgcagtagttgcggattcccgtggcgtaactgtagataaaatgactgaactgcgtaaagcaggtcgcgaagctggcgtatacatgcgtgttgttcgtaacaccctgctgcgccgtgctgttgaaggtactccgttcgagtgcctgaaagacgcgtttgttggtccgaccctgattgcatactctatggaacacccgggcgctgctgctcgtctgttcaaagagttcgcgaaagcgaatgcaaaatttgaggtcaaagccgctgcctttgaaggtgagctgatcccggcgtctcagatcgaccgcctggcaactctgccgacctacgaagaagcaattgcacgcctgatggcaaccatgaaagaagctagcgctggcaaactggttcgtactctggctgctgtacgcgatgcgaaagaagctgcttaatcgcagttatctttttaacgcattcgcttacgtataaacttattctgatattcaggaacaatttaaatgtctatcactaaagatcaaatcattgaagcagttgcagctatgtctgtaatggacgttgtagaactgatctctgcaatggaagaaaaattcggtgtttccgctgctgctgctgtagctgtagctgctggcccggttgaagctgctgaagaaaaaactgaattcgacgtaattctgaaagctgctggcgctaacaaagttgctgttatcaaagcagtacgtggcgcaactggcctgggtctgaaagaagctaaagacctggtagaatctgcaccggctgctctgaaagaaggcgtgagcaaagacgacgcagaagcactgaaaaaagctctggaagaagctggcgctgaagttgaagttaaataagccaacccttccggttgcagcctgagaaatcaggctgatggctggtgactttttagtcaccagcctttttgcgctgtaaggcgccagtagcgtttcacactgtttgactactgctgtgcctttcaatgcttgtttctatcgacgacttaatatactgcgacaggacgtccgttctgtgtaaatcgcaatgaaatggtttaagcgtgatagcaacaggcattgcggaaagtgttccattttccggtcaacaaaatagtgttgcacaaactgtccgctcaatggacagatgggtcgacttgtcagcgagctgaggaaccctatggtttactcctataccgagaaaaaacgtattcgtaaggattttggtaaacgtccacaagttctggatgtaccttatctcctttctatccagcttgacagctttcagaaatttatcgagcaagatcctgaagggcagtatggtctggaagctgctttccgttccgtattcccgattcagagctacagcggtaattccgagctgcaatacgtcagctaccgccttggcgaaccggtgtttgacgtccaggaatgtcaaatccgtggcgtgacctattccgcaccgctgcgcgttaaactgcgtctggtgatctatgagcgcgaagcgccggaaggcaccgtaaaagacattaaagaacaagaagtctacatgggcgaaattccgctcatgacagacaacggtacctttgttatcaacggtactgagcgtgttatcgtttcccagctgcaccgtagtccgggcgtcttctttgactccgacaaaggtaaaacccactctagcggtaaagtgctgtataacgcgcgtatcatcccttaccgtggttcctggctggacttcgaattcgatccgaaggacaacctgttcgtacgtatcgaccgtcgccgtaaactgcctgcgaccatcattctgcgcgccctgaactacaccacagagcagatcctcgacctgttctttgaaaaagttatctttgaaatccgtgataacaagctgcagatggaactggtgccggaacgcctgcgtggtgaaaccgcatcttttgacatcgaagctaacggtaaagtgtacgtagaaaaaggccgccgtatcactgcgcgccacattcgccagctggaaaaagacgacgtcaaactgatcgaagtcccggttgagtacatcgcaggtaaagtggttgctaaagactatattgatgagtctaccggcgagctgatctgcgcagcgaacatggagctgagcctggatctgctggctaagctgagccagtctggtcacaagcgtatcgaaacgctgttcaccaacgatctggatcacggcccatatatctctgaaaccttacgtgtcgacccaactaacgaccgtctgagcgcactggtagaaatctaccgcatgatgcgccctggcgagccgccgactcgtgaagcagctgaaagcctgttcgagaacctgttcttctccgaagaccgttatgacttgtctgcggttggtcgtatgaagttcaaccgttctctgctgcgcgaagaaatcgaaggttccggtatcctgagcaaagacgacatcattgatgttatgaaaaagctcatcgatatccgtaacggtaaaggcgaagtcgatgatatcgaccacctcggcaaccgtcgtatccgttccgttggcgaaatggcggaaaaccagttccgcgttggcctggtacgtgtagagcgtgcggtgaaagagcgtctgtctctgggcgatctggataccctgatgccacaggatatgatcaacgccaagccgatttccgcagcagtgaaagagttcttcggttccagccagctgtctcagtttatggaccagaacaacccgctgtctgagattacgcacaaacgtcgtatctccgcactcggcccaggcggtctgacccgtgaacgtgcaggcttcgaagttcgagacgtacacccgactcactacggtcgcgtatgtccaatcgaaacccctgaaggtccgaacatcggtctgatcaactctctgtccgtgtacgcacagactaacgaatacggcttccttgagactccgtatcgtaaagtgaccgacggtgttgtaactgacgaaattcactacctgtctgctatcgaagaaggcaactacgttatcgcccaggcgaactccaacttggatgaagaaggccacttcgtagaagacctggtaacttgccgtagcaaaggcgaatccagcttgttcagccgcgaccaggttgactacatggacgtatccacccagcaggtggtatccgtcggtgcgtccctgatcccgttcctggaacacgatgacgccaaccgtgcattgatgggtgcgaacatgcaacgtcaggccgttccgactctgcgcgctgataagccgctggttggtactggtatggaacgtgctgttgccgttgactccggtgtaactgcggtagctaaacgtggtggtgtcgttcagtacgtggatgcttcccgtatcgttatcaaagttaacgaagacgagatgtatccgggtgaagcaggtatcgacatctacaacctgaccaaatacacccgttctaaccagaacacctgtatcaaccagatgccgtgtgtgtctctgggtgaaccggttgaacgtggcgacgtgctggcagacggtccgtccaccgacctcggtgaactggcgcttggtcagaacatgcgcgtagcgttcatgccgtggaatggttacaacttcgaagactccatcctcgtatccgagcgtgttgttcaggaagaccgtttcaccaccatccacattcaggaactggcgtgtgtgtcccgtgacaccaagctgggtccggaagagatcaccgctgacatcccgaacgtgggtgaagctgcgctctccaaactggatgaatccggtatcgtttacattggtgcggaagtgaccggtggcgacattctggttggtaaggtaacgccgaaaggtgaaactcagctgaccccagaagaaaaactgctgcgtgcgatcttcggtgagaaagcctctgacgttaaagactcttctctgcgcgtaccaaacggtgtatccggtacggttatcgacgttcaggtctttactcgcgatggcgtagaaaaagacaaacgtgcgctggaaatcgaagaaatgcagctcaaacaggcgaagaaagacctgtctgaagaactgcagatcctcgaagcgggtctgttcagccgtatccgtgctgtgctggtagccggtggcgttgaagctgagaagctcgacaaactgccgcgcgatcgctggctggagctgggcctgacagacgaagagaaacaaaatcagctggaacagctggctgagcagtatgacgaactgaaacacgagttcgagaagaaactcgaagcgaaacgccgcaaaatcacccagggcgacgatctggcaccgggcgtgctgaagattgttaaggtatatctggcggttaaacgccgtatccagcctggtgacaagatggcaggtcgtcacggtaacaagggtgtaatttctaagatcaacccgatcgaagatatgccttacgatgaaaacggtacgccggtagacatcgtactgaacccgctgggcgtaccgtctcgtatgaacatcggtcagatcctcgaaacccacctgggtatggctgcgaaaggtatcggcgacaagatcaacgccatgctgaaacagcagcaagaagtcgcgaaactgcgcgaattcatccagcgtgcgtacgatctgggcgctgacgttcgtcagaaagttgacctgagtaccttcagcgatgaagaagttatgcgtctggctgaaaacctgcgcaaaggtatgccaatcgcaacgccggtgttcgacggtgcgaaagaagcagaaattaaagagctgctgaaacttggcgacctgccgacttccggtcagatccgcctgtacgatggtcgcactggtgaacagttcgagcgtccggtaaccgttggttacatgtacatgctgaaactgaaccacctggtcgacgacaagatgcacgcgcgttccaccggttcttacagcctggttactcagcagccgctgggtggtaaggcacagttcggtggtcagcgtttcggggagatggaagtgtgggcgctggaagcatacggcgcagcatacaccctgcaggaaatgctcaccgttaagtctgatgacgtgaacggtcgtaccaagatgtataaaaacatcgtggacggcaaccatcagatggagccgggcatgccagaatccttcaacgtattgttgaaagagattcgtagcctgggtatcaacatcgaactggaagacgagtaattctcgctcaaacaggtcactgctgtcgggttaaaacccggcagcggattgtgctaactccgacgggagcaaatccgtgaaagatttattaaagtttctgaaagcgcagactaaaaccgaagagtttgatgcgatcaaaattgctctggctagcccagacatgatccgtagttggtctttcggtgaagttaaaaagccggaaaccatcaactaccgtacgttcaaaccagaacgtgacggccttttctgcgcccgtatctttgggccggtaaaagattacgagtgcctgtgcggtaagtacaagcgcctgaaacaccgtggcgtcatctgtgagaagtgcggcgttgaagtgacccagactaaagtacgccgtgagcgtatgggccacatcgaactggcttccccgactgcgcacatctggttcctgaaaagcctgccgtcccgtatcggtctgctgctcgatatgccgctgcgcgatatcgaacgcgtactgtactttgaatcctatgtggttatcgaaggcggtatgaccaacctggaacgtcagcagatcctgactgaagagcagtatctggacgcgctggaagagttcggtgacgaattcgacgcgaagatgggggcggaagcaatccaggctctgctgaagagcatggatctggagcaagagtgcgaacagctgcgtgaagagctgaacgaaaccaactccgaaaccaagcgtaaaaagctgaccaagcgtatcaaactgctggaagcgttcgttcagtctggtaacaaaccagagtggatgatcctgaccgttctgccggtactgccgccagatctgcgtccgctggttccgctggatggtggtcgtttcgcgacttctgacctgaacgatctgtatcgtcgcgtcattaaccgtaacaaccgtctgaaacgtctgctggatctggctgcgccggacatcatcgtacgtaacgaaaaacgtatgctgcaggaagcggtagacgccctgctggataacggtcgtcgcggtcgtgcgatcaccggttctaacaagcgtcctctgaaatctttggccgacatgatcaaaggtaaacagggtcgtttccgtcagaacctgctcggtaagcgtgttgactactccggtcgttctgtaatcaccgtaggtccatacctgcgtctgcatcagtgcggtctgccgaagaaaatggcactggagctgttcaaaccgttcatctacggcaagctggaactgcgtggtcttgctaccaccattaaagctgcgaagaaaatggttgagcgcgaagaagctgtcgtttgggatatcctggacgaagttatccgcgaacacccggtactgctgaaccgtgcaccgactctgcaccgtctgggtatccaggcatttgaaccggtactgatcgaaggtaaagctatccagctgcacccgctggtttgtgcggcatataacgccgacttcgatggtgaccagatggctgttcacgtaccgctgacgctggaagcccagctggaagcgcgtgcgctgatgatgtctaccaacaacatcctgtccccggcgaacggcgaaccaatcatcgttccgtctcaggacgttgtactgggtctgtactacatgacccgtgactgtgttaacgccaaaggcgaaggcatggtgctgactggcccgaaagaagcagaacgtctgtatcgctctggtctggcttctctgcatgcgcgcgttaaagtgcgtatcaccgagtatgaaaaagatgctaacggtgaattagtagcgaaaaccagcctgaaagacacgactgttggccgtgccattctgtggatgattgtaccgaaaggtctgccttactccatcgtcaaccaggcgctgggtaaaaaagcaatctccaaaatgctgaacacctgctaccgcattctcggtctgaaaccgaccgttatttttgcggaccagatcatgtacaccggcttcgcctatgcagcgcgttctggtgcatctgttggtatcgatgacatggtcatcccggagaagaaacacgaaatcatctccgaggcagaagcagaagttgctgaaattcaggagcagttccagtctggtctggtaactgcgggcgaacgctacaacaaagttatcgatatctgggctgcggcgaacgatcgtgtatccaaagcgatgatggataacctgcaaactgaaaccgtgattaaccgtgacggtcaggaagagaagcaggtttccttcaacagcatctacatgatggccgactccggtgcgcgtggttctgcggcacagattcgtcagcttgctggtatgcgtggtctgatggcgaagccggatggctccatcatcgaaacgccaatcaccgcgaacttccgtgaaggtctgaacgtactccagtacttcatctccacccacggtgctcgtaaaggtctggcggataccgcactgaaaactgcgaactccggttacctgactcgtcgtctggttgacgtggcgcaggacctggtggttaccgaagacgattgtggtacccatgaaggtatcatgatgactccggttatcgagggtggtgacgttaaagagccgctgcgcgatcgcgtactgggtcgtgtaactgctgaagacgttctgaagccgggtactgctgatatcctcgttccgcgcaacacgctgctgcacgaacagtggtgtgacctgctggaagagaactctgtcgacgcggttaaagtacgttctgttgtatcttgtgacaccgactttggtgtatgtgcgcactgctacggtcgtgacctggcgcgtggccacatcatcaacaagggtgaagcaatcggtgttatcgcggcacagtccatcggtgaaccgggtacacagctgaccatgcgtacgttccacatcggtggtgcggcatctcgtgcggctgctgaatccagcatccaagtgaaaaacaaaggtagcatcaagctcagcaacgtgaagagcgttgtgaactccagcggtaaactggttatcacttcccgtaatactgaactgaaactgatcgacgaattcggtcgtactaaagaaagctacaaagtaccttacggtgcggtactggcgaaaggcgatggcgaacaggttgctggcggcgaaaccgttgcaaactgggacccgcacaccatgccggttatcaccgaagtaagcggttttgtacgctttactgacatgatcgacggccagaccattacgcgtcagaccgacgaactgaccggtctgtctagcctggtggttctggattccgcagaacgtaccgcaggtggtaaagatctgcgtccggcactgaaaatcgttgatgctcagggtaacgacgttctgatcccaggtaccgatatgccagcgcagtacttcctgccgggtaaagcgattgttcagctggaagatggcgtacagatcagctctggtgacaccctggcgcgtattccgcaggaatccggcggtaccaaggacatcaccggtggtctgccgcgcgttgcggacctgttcgaagcacgtcgtccgaaagagccggcaatcctggctgaaatcagcggtatcgtttccttcggtaaagaaaccaaaggtaaacgtcgtctggttatcaccccggtagacggtagcgatccgtacgaagagatgattccgaaatggcgtcagctcaacgtgttcgaaggtgaacgtgtagaacgtggtgacgtaatttccgacggtccggaagcgccgcacgacattctgcgtctgcgtggtgttcatgctgttactcgttacatcgttaacgaagtacaggacgtataccgtctgcagggcgttaagattaacgataaacacatcgaagttatcgttcgtcagatgctgcgtaaagctaccatcgttaacgcgggtagctccgacttcctggaaggcgaacaggttgaatactctcgcgtcaagatcgcaaaccgcgaactggaagcgaacggcaaagtgggtgcaacttactcccgcgatctgctgggtatcaccaaagcgtctctggcaaccgagtccttcatctccgcggcaagcttccaggagaccactcgcgtgctgaccgaagcagccgttgcgggcaaacgcgacgaactgcgcggcctgaaagagaacgttatcgtgggtcgtctgatcccggcaggtaccggttacgcgtaccaccaggatcgtatgcgtcgccgtgctgcgggtgaagctccggctgcaccgcaggtgactgcagaagacgcatctgccagcctggcagaactgctgaacgcaggtctgggcggttctgataacgagtaatcgttaatccgcaaataacgtaaaaacccgcttcggcgggtttttttatggggggagtttagggaaagagcatttgtcagaatatttaaggaatttctgaatactcataatcaatgtagagatgactaatatcctgaaactgactgaactaattgagtcaaactcggcaaggattcgatactattcctgtgtaactttcttaaggaacgagaatgaaacaggaagtggaaaagtggcgaccttttggacatccggatggtgatattcgtgatttaagttttcttgatgctcatcaggctgtctacgttcagcatcatgagggcaaagagcctttagagtatcgcttttgggttacctactctcttcactgcttcacaaaagattatgaacatcagacgaacgaagaaaaacaaagcttaatgtaccacgcgcctaaagaatctcgtcccttctgccagcaccgttataacttagcgcgcacacacttaaaaagaactattttggcgctgccagaaagcaacgttattcatgccgggtatggtagctatgccgtgattgaggtggacttagacggaggagataaggcattttactttgttgcgttcagggctttcagggaaaagaaaaaactccgtttgcatgtaactagcgcttatcccatttctgaaaaacagaaaggtaaaagtgtgaaatttttcaccattgcctacaacttattgagaaataagcagcttcctcagcccagtaaataacaaaacccaccttaaggtgggtttcgccagagaattatctctggtattcagaacgccattaccggactttgccttgaccttgcgataatcgcaggttgcgggatgtctgaatttcttcagtctgctgcatcctggaagatgagaacatgtgttcttattttcgtctctatcatagttgagtatttactctcttacaatcagatctctttcattgctcaacaggcgatggcttcagactttgcattacggaatttttaagaaaggcagggcgaaacgaggaagaagcttttcgccctggacaacattcctgctgacggcactaccataaaaaaacacaacgctttcaacaaccttgcgtttttcatcttccgtagcggctcggaataaatttacgttcttacattccgtctcatagtctttggctggcgcgtcccagatagctgtcccagtctttccataccggctgcaaaccctgagcggttaacgcggcagcaaccgcttccggtctgcgatcgtcgtgcggactgaactgttccaactcggggtgattatcggcatagccacctggctgcgttttgctgaaggcgctgacgttattgatcgccagcggaataacgcgatcgcgaaaccacggactttcccgcgtggagagactcagttcaatctccggtgcaagcagtcggaaggcgcagatggtttgcactaactggcgttcatccataatgctcgcaggctcaatgccgccagtacacgggcgcaggcgcggaaaggagacagagtaacggctttgccagtaatgctgttgcagccatagcaaatgttcggcaaccatatagctgtcaacgcgccagttgtcggaaaggccaattagcgcgccgaggcctatcttatcaatccccgcacgccccagccgatccggcgtttccagccgccagaagaagtcctgttttttgcctttcagatgatggcgggcataagtcgcctcgtgatatgtctcctgataaaccatcacgccatccagaccaagttgctttaactcggcgtattccgtctccgccagcggttgcacttccatctgtagactagagaactgttcacgaagggcagggagatgacgacgaaagtaatccatccccactttcgcctgatgttcaccagtgactaacagcagatgttcaaagcccatctcccgtatagcggcactttccctggcaatatccgcttcatccagcgttttgcgcttgatgcgattactcatggaaaatccacagtacgtgcagtcgttagcgcaaagattggaaagataaagcgggacgtagaaactaactgtgttgccaaatcgctgacgggtcagacgctgcgcccgttgggccagttgttccagatagccactggcggcagggcttaacagcgccatcatgtcgtcgcgggtgagttggctggcatttagcgcccgctctacgtcagcagccgttttgccgttgatacgcaggcggatgtcgtcccagtccagttgtcgccagcgatcgctgaaggttttcatgcgcttgcctccagaaatccggtcagcgggctggtggcatgagcaaaataactgcggctgcccggtccggactgacgtgccagtaggcctgcttctaccgccagacgaaatgccttcgccatgttgacgggatcgtccgcgacggcaatcgccgtattcactaacaccgcgtcggcccccatttccagcgcctgcgcggcatggctgggaacgccgatgccagcatcgacaaccaccggcactgtggcctgctggataataatctccagcatggcgcgggtttccagtccctgattgctgccaatcggcgcgccgagcggcatcaccgctgcacagccgacttcttccagacgtttacacaataccggatcggccccgcagtaaggcagcacgacaaatccctgttgtaccagcgtttcggcggctttcagggtttcgatgggatcgggcaacagccagcgggcgtcagggtgaatctctaattttaaccagtttgtgcctaacgcttcacgagccagatgggcggcgaaaatggcttcttccgctgttttcgccccggatgtatttggcagcagggtcacacccgccgcgataagcggttcgaggatagcgtcgttgtgctggcgcaagtcgacacgtttcatcgccagtgtcaccagctggctgccggaagcgcggatcgcctccaccatcagttgactagaagcgaatttccctgtgccggtaaacagatgactatcaaacgttttgtccgcaatacgtaacatttcaaccccctgcaataacctgaaaaagcaggatctggtcgccatcctgcacgatatgttgcgcccactgctcacgcgggacgatttgctgattaatcgccagagccgcgcccgcttgtcgttggtcgagttgctccagtagttcgtgaacagtttgcccggcggcgcactgcatcgcttgatcgttaaacaggatctgcattgcttcctccgcataccgggcaaccactggcgcggcgcaacgccaggctgcgccactggctgcttttaccgtcgaacagtcggagttctcccgcaggtgtctctataccgcttaataacttaatggcttccagtgcctgcaaagtgcccataaccccgaccaccgggccaaccacgcccgccgtgcggcagttgcgttctggctcctggttatctggccacaggcagcggtaacacccctgctcccagggcggcgtcagtaccatcaactgaccgccaaatccgaccgcgctggcggtgataagcggcgtgttgagtgccacgcaggcggcattaatctcctggcgagtcgccatattgtcggtacagtcgagcaccacatcggcccgtgcaaccgcatcttttaacgcctcacccgttaaccgttgttgtaatgctgtcagttgaatgtcgggattcaactgtgtcagtcgctgttggctgacctggcttttcgggcgatcgatatcttcagtggtaaagaggatttgtcgttgcagattgcttaaatgcacatcgtcgtcatctgccagtaccagcgtcccgacgccagcgcccgccaggtacagcgcagcaggtgtacccagcccgcccagaccgataatcagcacctggctgtcgagcagtttttgctgcccgtccagagcgatatcgtcgagcaggatttggcggctataacgcataaagtcacggtcattcatcgccaactcctgcaatttccagcaactgtgccgttgccaaacgccagtctgcggcttgagtaatggcgctgacgacggcgatactgccgacacccgttgctatcaccgcaggcgcgcgtgccagactgataccgccaatcgccacggtgggataatccgccagtcgctcaacatgccgtgccagctgttccagcccctgcggtgcagaaggcatctgtttggtttgcgtcgggaacacatgtcccagcgcgatataagaggggcgtgctgccagcgcgacgtcgatttccatatcgtcatgtgtgctaacgcccagccgcaggcctgccgcgcggatggcattgagatcggtggcttgcaaatcttcctgccccaaatggacgccatacgcctgatgcttgatcgccagccgccagtaatcgttgataaacaatcgcgcgttatagcggcggcccagcgcaattgccgccacgacatcggcttccacctcttcatcgcgccgatctttgatgcgtagctggagagtacgtacgcctgcatccaacagacgttcgatccactgtacgctgtccaccaccgggtacagtccactacgaaaaggtacaggaggaaaatcaggctgatacatcacgcttcctccttacgcaggtagatttctccgcctctggcacggaagttctcgctcatatccgccattcccatttcaatagtttgcgtggcggcgtaatcacgcacttcctggctgattttcatgctgcagaatttcggcccacacatggagcaaaaatgggcgactttaccactctcttgcggcagggtttcatcgtgataagcgcgggcggtaaacgggtcgagggccagattaaactggtcttcccagcgaaattcgaagcgggctttgctcatggcgttatcgcgaatttgcgcgcccggatgccctttcgccaggtcagcggcgtgggcagcaatcttataggtgataagcccctgcttaacatcttctttattgggcagacccagatgctcttttggcgttacgtaacagagcatcgcgcagccaaaccagccaatcatcgccgcaccaatcccgctcgtgaagtggtcatagcccggcgcaatatcggtagttagcggccccagagtgtaaaacggcgcttcgtggcagtgctctaactcctcggtcatattgcggcggatcatctgcatcggcacgtggcctgggccttcaatcatcacctgcacgtcatattcccaggcaattttggtcagttcgcccagcgtatgcagctcggcaaactgcgcttcatcgttggcgtcctgaatagaaccggggcgcagaccgtcgcccaggctcaggctaacgtcataagcggcacagatttcacaaatttcgcggaagtgttgatagaggaaattttcctgatgatgggagaggcaccatttcgccataatgctaccgccgcgagagacgataccggtcaggcgtttcgcggtcatcggcacatagcgcagcagtacgcccgcatggatagtgaagtaatccacaccttgctcggcctgttccagcagcgtgtcgcggaacgcttcccaggtaagatcttcggcgatcccgttaaccttctccagcgcctggtagatcggcactgtaccgatcggcaccgggctgttacgcaaaatccactcgcgggtttcgtgaatatagcgaccggtggagagatccatcaccgtatccgctccccagcgcgtggaccataccagcttttccacttcttcttcgatggaagaggtgaccgcgctgttgccgatattggcgttaacttttaccaggaaattgcgaccaataatcatcggctcgctttccggatgattaatgttggccgggataatcgcacgtccggcagcaacttcatcacggacaaattccgcagtgatattttccggcagatgtgcgccaaagctcattcccggatgctggtggcgtaaaacctcgctacggatgcgctcgcggcccatattctcgcggatggcgatgaattccatttccggcgtgatgatgccctggcgggcgtagtgcagttgggtgacacggcgtcctgctttggcgcgttttggtgttagtacgccgctaaaacgcagttcgtcgaggccatcatctgccagccgcgctttagtgtaatcggaactgcgcacggtaagttcttcggtatcgccgcgcgcatcgatccacggctggcgtagttttgccagcccttgctgcacgttaatggcaatctgcggatcaccatacgggccggaggtgtcgtagaccggaatcgcttcgttttcttcgtactgcggctgttctttgctaccgccaattagcgtcgggctaagctggatctcacgcatcggcacgcgcacgccggggtgtgtgccagtgatataaatgcgtttactgttgggaaaggcggtgccttccagggtgtcgataaaatgttgggcccgggcgcgttgttcgcggcgggtcagttttgttgcagacatagctcattccaaaaagttaaggacgtggcttgtcagacgacggatgaagcaagagacgatcgccgcaggggcgatgcgatagcagattaactcttgttcccttcgcaggtattagcctgatcaggttccgcggatcccgaataaacggtctcagccagttaaggcactccgacaagaaattagccccgcaaatggggcattgaatgtaaattacgcgttaacagcgcagaactcaagcaggatgtttgacgcgggcggcgtcaagcaccagcagaatcagcttatcttccagcacaaagcgcgcttccagcgcctcgccgatgtcagataaaacctgttgaaactcaaggtaattatcatgatcgatggcggtttccagactggaatcgtagtaatccataatctgttgagtattggcttcgagttgcggccaaatcttcgcggcgcgcgcgagttgcccgttgccttccagcttatgaagaatgcgctcataaatactgaaatgtccggcagacaagtaatcgaccaggctctgacaaaaatcatcaagggctttttcgtttagcctcatgtagctttctttgccaggcttaatgccaaccagattgtagtaagccacgagcagatgcttacgtacatgtagccagcgatcaaccagtttgttacttcctctgacgcgctccgtcaggttatcgagctggttaagcatgattgactccgcaagtttgtattcaaaaactgctcagtgagaaatgtaaaaaccatgttaaacatgccagtgatgcaaaggtagtgcaagagctatggatcgtataattgaaaaattagatcacggctggtgggtcgtcagccatgaacaaaaattatggttgccgaagggagaattgccatatggcgaagcggcaaatttcgatcttgtgggtcagcgcgcactacaaatcggcgaatggcagggggaacctgtttggttagtacaacagcagcggcgtcacgatatggggagcgtacgtcaggtcattgatctcgatgttgggctgtttcaactggccggacgaggcgtacaactggcggagttttaccgaagccataaatactgtggttactgcgggcatgaaatgtatccgagcaaaaccgaatgggcgatgctgtgcagccattgccgtgagcgttactacccgcaaatcgccccctgcattattgttgccatccgtcgcgatgatagcatcctcctcgcccagcatacccgccatcgtaacggtgtccatacagtacttgccggattcgtcgaagtgggcgaaaccctcgagcaggcagtcgcgcgggaagtgatggaagagagcggaattaaagttaaaaacttgcgttacgtgacttctcagccgtggccgtttcctcagtctttaatgaccgcgtttatggcggaatatgacagcggcgacatcgtgatcgacccgaaagaattgctcgaggcgaactggtatcgctatgacgatttgccgttactcccgccgcccggcaccgtagcgcgccgtctgatagaagatacggtggcgatgtgtcgggcagagtatgagtgatgatacactgaccgcctgacgcactaaggaacagccaaaatgaccgaacttaaaaacgatcgttatctgcgggcgctgctgcgccagcccgttgatgtcactccagtatggatgatgcgccaggcgggtcgctatctaccggaatataaagccacgcgcgcccaggcaggcgattttatgagcctgtgcaaaaacgccgagctggcgtgcgaagtgactttgcaaccgctgcgtcgctacccgctggatgcggcgatcctcttttccgatatcctcaccgtgccggacgcgatggggttagggctctattttgaagccggagaaggtccgcgttttaccagcccagtcacctgcaaagctgacgtcgataaactgccaattccggacccggaagatgaactgggttacgtgatgaacgcggtgcgtaccattcgtcgcgaactgaaaggcgaagtgccgctgattggtttttccggcagcccgtggacgctggcgacctacatggtggaaggcggcagcagcaaagccttcaccgtgatcaaaaaaatgatgtatgccgatccgcaggcgctgcacgctctgctcgataaactggcgaaaagcgtcactttgtatctgaatgcgcagattaaagccggtgctcaggcagtgatgattttcgacacctggggcggcgtgcttaccgggcgcgattatcaacagttcagcctctattacatgcataaaattgttgatggtttactgcgtgaaaacgacggtcgccgcgtaccggtcacgctgtttaccaaaggcggcggacagtggctggaagccatggcagaaaccggttgcgatgcgctgggcctcgactggacaacggacatcgccgatgcgcgccgccgtgtgggcaataaagtcgcgttgcagggtaatatggatccgagcatgctgtacgcgccgcctgcccgcattgaagaagaagtagcgactatacttgcaggtttcggtcacggcgaaggtcatgtctttaaccttggtcacggcattcatcaggatgtgccgccagaacatgctggcgtgttcgtggaggcagtgcatcgactgtctgaacagtatcaccgctaaggagtgattatggatctcgcgagtttacgcgctcaacaaatcgaactggcttcttctgtgatccgcgaggatcgactcgataaagatccaccggatctgatcgccggagccgatgtcgggtttgagcagggcggagaagtgacgcgagcggcgatggtgctgctgaaatatcccagccttgagctggtcgagtataaagttgcccgcatcgccaccaccatgccttacattccaggttttctttccttccgcgaatatcctgcgctgctggcagcgtgggagatgctgagccaaaagccggatttagtgtttgtcgatggtcatgggatcagccatcctcgccgtcttggcgtcgccagccattttggcttattggtggatgtgccgaccattggcgtggcgaaaaaacggctctgcggtaaattcgaaccgctctccagcgaaccgggcgcgctggccccactgatggataaaggcgagcagctggcctgggtctggcgcagcaaagcgcgctgtaacccgttgtttatcgctaccggccatcgggtcagcgtggacagcgcgctggcgtgggtacaacgctgcatgaaaggctatcgtctgccggagccaacgcgctgggcggacgcggtggccagcgaacgtccggcgttcgtgcgctatacagcaaatcagccctaattcaggtaaactgcggataatttccgtatttgagaactcaacatgttacaaaacccaattcatctgcgtctggagcgcctggaaagctggcagcatgtcactttcatggcttgcttatgcgaacgcatgtaccccaattacgccatgttctgccagcaaaccggttttggtgatgggcaaatttaccgtcgcattctcgatctcatctgggaaacgctgaccgttaaagacgcaaaagtaaatttcgacagccaactggagaaatttgaagaagcgattcctagtgccgacgatttcgatctgtacggcgtttatccggcaatcgatgcctgcgtggcgttaagtgaactggtccatagccgtttgagtggtgaaacgctcgaacacgcggtggaagtgagtaagacctccatcacgaccgttgcgatgctggaaatgactcaggctggtcgcgaaatgagcgatgaagagcttaaagaaaacccagctgtagagcaagaatgggacattcagtgggaaatattccgacttttagctgagtgcgaagaacgcgatatcgagctgataaaaggccttagggcagacctgcgtgaggcgggtgagagcaatattggtataatttttcagcaataagaccagaaaacgtgatttaacgcctgatttgtcgtacctggagtcttccctttcgccccccgtctggtctacatttggggggcgaaaaaaagtggctatcggtgcgtgtatgcaggagagtgctattctggcatttccgtcgcactcgatgcttagcaagcgataaacacattgtaaggataacttatgaacaagactcaactgattgatgtaattgcagagaaagcagaactgtccaaaacccaggctaaagctgctctggagtccactctggctgcaattactgagtctctgaaagaaggcgatgctgtacaactggttggtttcggtaccttcaaagtgaaccaccgcgctgagcgtactggccgcaacccgcagaccggtaaagaaatcaaaattgccgcagctaacgtaccggcatttgtttctggcaaggcactgaaagacgcagttaagtaagattgcgtggcagtgaacagttttaacgaaggggtggttagtccccttttgtctttctggcgtcgaagtttgatgctggctggcgctctgcttctcactgcctgtagtcataactctagtcttcctccctttaccgccagtggatttgctgaagaccagggcgcggtacgcatctggcgaaaagacagcggcgataatgtgcatctgcttgccgtgtttagcccgtggcgcagtggcgataccacgacgcgagagtatcgctggcagggcgataacctcacgctcatcaatatcaatgtttacagcaaaccgccggtgaatattcgcgcgcgttttgacgatcgcggtgatctgagctttatgcaacgtgaatccgatggggaaaagcagcagctttctaacgaccaaatcgatttataccgttatcgtgctgatcagatccgccagattagcgatgccttacgtcaggggagagtcgtgctgcgccaggggcgctggcatgcgatggaacagaccgtgaccacctgcgaagggcaaaccattaaacctgatttagatagccaggcgatagcgcatatcgagcgccgccagagccgctcttctgttgatgtcagcgtggcatggctggaagcgcccgaaggtagccaattactgttagtggcaaactctgatttctgtcgctggcaacccaacgagaaaacgttctgatttaccagtggcccatacccatatgaccgccaccaccgcagccgccgtagcccatgcccattccggctccgcgcggaatacccgcttcagccatcgcgatatctcgtttcacccgtaactcatctaagctctgacgcaaattctccatctctttggcgaccgcgttaattttgctgctatccggtgggttcgcggctaacagggcattgtattcataacgcttcgtcaccagttgctgttgcagtgcgctgctttgagcgtaaaagtcattatggattttctgccacgctgtctgttgttcgctggtcaaaggcgcggcattttgctgccacataccgtgtccgccgtgagcaaatgcagatgtgcttcccatcgccattgcactaagcgccatcattaccagggcaattttcgtgttccgtttcatggttaatcctccagtggttgtcttacttcgggtattgcatcttccgtgccaacgatgaaacgctgatatgacgggtaatctggcatgataaacgagtaaaaatgactcgcctgctgcgggtagcgagtcatttttactcattgaaacttaagcctttgtgttacagcgcagggtaagcgctgataaaagatggcatgatttctgctgtcagaaagggatgagcaggcaaagaagaagatgcgttttatgcaacgttctaaagactccttagctaaatggttaagcgcgatcctccccgtggtcattgttgggctggtgggattgtttgcggtaactgtgattcgtgattatgggcgggcaagcgaggcagaccgccaggcattactggaaaaaggtaatgtgcttatccgcgctctggagagcggaagccgcgtagggatggggatgcgaatgcaccatgtacagcaacaggcgcttctggaagagatggcgggacagccgggagtgttgtggttcgcagtcaccgatgcgcagggcatcattattcttcatagcgaccccgataaggtcgggcgtgcgctctatagcccggatgaaatgcagaaattaaagccagaggaaaactcccgctggcggctgcttgggaaaacggaaactacgcctgcacttgaggtctatcgtttgttccagccaatgagtgcgccctggcggcatggaatgcacaatatgccgcgctgtaacggcaaagctgtgccacaagtagatgcacaacaggctatttttatcgccgttgatgccagtgatctggttgcaacccagagtggggaaaagcgcaataccctgattatcctcttcgccctggcgacggtcttgctggcaagcgtattgagtttcttctggtatcgccgctatctgcgcagccgccagcttctacaagatgaaatgaagcgcaaagagaagctggtggcgctggggcatcttgcggcaggcgttgcccacgaaatccgtaacccactttccagcattaaaggactggcgaaatactttgccgagcgcgcgcctgcagggggagaagcgcatcaactggcgcaggtgatggcgaaagaggccgaccgtttaaaccgcgtggtaagcgagttgctggaactggttaagccaacgcatctggctttgcaggcggtggatctcaacacgctgattaaccacagtttacagctggtaagtcaggatgcaaacagccgggagatccagttacgctttaccgccaacgacacattaccggaaattcaggccgacccggacaggctgactcaggtcctgttgaatctctatctcaatgctattcaggcgattggtcagcatggcgtgattagcgtgacggccagcgaaagcggcgcgggcgtgaaaatcagcgttaccgacagcggtaagggaattgcggcagatcagcttgatgccatcttcactccgtacttcaccactaaagccgaaggcaccggattggggctggcggtcgtgcataatattgttgaacaacacggtggtacaattcaggtcgcaagccaggagggaaaaggcagtacgttcaccctctggcttccggtcaatattacgcgtaaggacccacaaggatgacgcacgataatatcgatattctggtggtggatgatgacattagccactgcactattttgcaggctttactgcgcggctggggctataacgtcgcgctggcgaacagcgggcgacaggcgttggagcaggtgcgggaacaggtttttgatcttgtgctttgcgatgtgcgaatggcggagatggacggcatcgccacgctgaaagagatcaaagcgttaaacccggcaattccggtgctgattatgactgcgtactccagcgtcgagacggcggtagaggcactgaaaactggggcgctggattatctcatcaagccgctggatttcgataacctacaggcgacgctggaaaaagcgctcgcgcatacgcacagtattgatgctgaaacacctgcggtgactgccagccagttcggtatggtcggtaaaagcccggcgatgcaacacctgctcagtgaaatcgccctcgtcgcgccaagcgaagccacggtactgatccacggcgattccggcaccggtaaagagctggtcgccagggcgattcacgccagtagcgcacgtagcgaaaaaccgctggtaacgctcaactgtgcggcactcaacgaatccttgctggaatctgaattgttcggtcacgaaaaaggggcgtttactggagccgataaacgccgggaagggcgctttgttgaggcggacggcggcacgctgtttctcgatgaaattggcgatatcagcccgatgatgcaggtgcgtctgctgcgtgcgattcaggagcgcgaagttcagcgtgtcggtagcaaccagattatcagcgttgatgtccggctgattgcggcgacccatcgcgatcttgccgcagaggtgaatgccgggcgttttcgccaggatctctactatcgcctgaatgtggtggcgattgaagtaccaagcctgcggcaacggcgggaagatatccctctgctggctggccattttctgcagcgctttgccgagcgtaatcgcaaggcggtaaaaggttttacgccccaggcgatggatctgttgattcattacgactggccgggaaatattcgtgagctggaaaacgcggtggaacgggcagtggtgctgctgaccggggaatatatttccgaacgcgagctgccgctggcgattgccagtacgccgatcccgctgggacaaagtcaggatattcagccgttggtggaagtggaaaaagaggtgattctggcggcgctggagaaaacgggcggcaacaaaaccgaagccgcccgtcagttagggatcacgcgcaaaacgctattggcaaaactgagccgttaattctgctcgcgttcgatagcgcgccagccgatatctttccggcagaagcagtcgtcccagtggatatcggtcattaaggcataggcgcgtttctgcgcttctgccacggtatgacccagcgcggtgacgcacagtacgcgcccgccgttggtcactacctgctcgtcatccgccagttttgtgcccgcgtggaacactttgccgcctgccacttcttccagcggcaggccgtggatcacgtcaccggtgcggtaatcacccggatatccacccgcagccatcaccacgccgagagaagcgcgttcatcccactcggacgttttctcgtccagtttgctttcacaggccgccaggcagagctcaaccagatcggacttcatgcgcagcataatcggctgggtttccggatcgccaaagcggcagttaaattcaataaccttcggattgccctgtttgtcgatcatcaggcccgcgtagagaaaaccggtgtaggtgttgccttccgccgccatgcctttcacggttggccagataatacgttccatggtgcgctgatgaacgtcatcggttactaccggcgcgggggagtaagcgcccatcccgccggtgtttggtccggtatctttatcgcctacgcgtttgtgatcctggctggtagccatcggcagcacatgctcgccgtccaccatcacgataaagctcgcttcttcgccatcgaggaactcttcgataacgatgcgatgacccgcgtcgccaaaagcgttgcccgccagcatatcgtgaacagccgcttccgcttcttccagcgtcatcgccacgataacgcctttcccggcagccagaccgtccgctttaatgacgattggcgcgcctttctcacgcagatacgccagcgcaggttctacctcggtgaagttctggtattccgccgtagggatcttatggcgggccaggaaatctttggtaaacgctttactgccttccagttgggccgcacctgcggttgggccgaagattttcagcccggcggcgcggaaggtatcgaccacgcctttcaccagcggcgcttccgggccgacgatggtcagatcaatcttttcgttttgtgcgaaatccaacagcgccgggatatcggtcacgccaatagcaacgttttgcagcgcgggttccagtgcagtgcctgcattacccggagcaacaaaaacagtctcaaccagcgggctctgggccgctttccaggccagcgcgtgctcgcgcccgccgttaccaatcactaatactttcatctattgctccattaatggcggaagtggcgcatgtcggtgaagagcatcgcaataccgtgctcgtcggcggcggcaatcacttcgtcatcacggatagaaccgccaggctggattacgcaggtcacgcccgcagcggcggcggcatcaataccgtcgcggaacgggaagaacgcgtcagaagccatgctggaacctttcacttccaggccttcatcggccgctttaataccggcgatttttgcggagtacacgcggctcatctggcccgcgccaatgccgatagtcatattgtttttggcatagacgatagcgttggatttcacaaacttcgccaccttccagcagaacagcgcatcacgcagttcctgttcgctcggctgacgtttggtcaccacgcgcagttcttccgcaccgaccatccccaggtcacgatcctgaaccagcagaccgccgttcacgcgtttgaaatcgaggcccggaacacgctcgccccactgaccgcaggtcagaacgcgtacgttctgtttggcggcggtgattttcagggcttcttcgctggcggacggcgcaataatcacttcgacaaactgacgagaaatgatggcctgtgcggtttccgcatccagctcgcggttaaaggcaatgatgccgccgaatgcggaggttgggtcggttttgtacgcgcgatcgtaagcatcaagaatggaattgccgatagccacgccgcaagggttggcgtgcttcacaatcacacatgccggctcggcgaactctttcacgcactccagcgccgcatcggtatcggcgatgttgttataagagagggctttaccctgaacctgggttgcggtagcaacggaggcttctttcacattctcttctatatagaaggcagcctgctggtggctgttctcgccgtaacgcatatccagcttcttaatgaagttcaggttcagcgtgcgtgggaagcgaccggcggcttctttgctttcaccgtggtaagccggaaccatgctgccgaagtagttggcaatcatgctgtcgtaggcggcagtgtgttcgaaggctttgatggcgaggtcgaaacgggttgcaagcgtcaggcttccttcgttgtcatccatctctttaataatggcgtcatagtcgctgctcttcaccacgattgcgacatctttatggttcttggcggcggagcgcaccatcgttgggccgccgatatcgatgttctcaaccgcatcttccaggctgcaaccttcacgggccacggtctgggcgaacggatacaggttaacaaccaccatatcgataggctggatctgatgttcttccataatggcatcgtcctggccgcgacggcccagaatgccaccatgtactttcggatgcagggtcttcacgcgtccatccatcatctccgggaaaccggtgtaatcggaaacttcggttaccggcagacctttttctgctaacagacgggcagtgccccctgtagacagcagctccacaccgcgtgcggaaagtgcctgggcgaattcgacgataccggctttgtcagaaacactgagcagagcgcggcggactggacgacgttgttgcatggtaaatcccctggatttgactattacagagagcgttagctgaatttttcgcgaaaaactcagctaacgcccctaacggggcatccttatttttcgcccgcattgtaacgaaaacgtttgcgcaacgctcgcgaatttttctctttcaatggtgatcacaattttgactgtggttaccgtgggcaaaatacagaaattacattgatgattgtggataactctgtgcgtaaaaaggtataaagcgggcttttgctggggaatgcagcagtcagtcatttttctgcaatttttctattgcggcctgcggagaactccctataatgcgcctccatcgacacggcggatgtgaatcacttcacacaaacagccggttcggttgaagagaaaaatcctgaaattcagggttgactctgaaagaggaaagcgtaatatacgccacctcgcgacagtgcgctaaagcgcgtcgcaactgctctttaacaatttatcagacaatctgtgtgggcactcgaagatacggattcttaacgtcgcaagacgaaaaatgaataccaagtctcaagagtgaacacgtaattcattacgaagtttaattctttgagcatcaaacttttaaattgaagagtttgatcatggctcagattgaacgctggcggcaggcctaacacatgcaagtcgaacggtaacaggaagaagcttgcttctttgctgacgagtggcggacgggtgagtaatgtctgggaaactgcctgatggagggggataactactggaaacggtagctaataccgcataacgtcgcaagaccaaagagggggaccttcgggcctcttgccatcggatgtgcccagatgggattagctagtaggtggggtaacggctcacctaggcgacgatccctagctggtctgagaggatgaccagccacactggaactgagacacggtccagactcctacgggaggcagcagtggggaatattgcacaatgggcgcaagcctgatgcagccatgccgcgtgtatgaagaaggccttcgggttgtaaagtactttcagcggggaggaagggagtaaagttaatacctttgctcattgacgttacccgcagaagaagcaccggctaactccgtgccagcagccgcggtaatacggagggtgcaagcgttaatcggaattactgggcgtaaagcgcacgcaggcggtttgttaagtcagatgtgaaatccccgggctcaacctgggaactgcatctgatactggcaagcttgagtctcgtagaggggggtagaattccaggtgtagcggtgaaatgcgtagagatctggaggaataccggtggcgaaggcggccccctggacgaagactgacgctcaggtgcgaaagcgtggggagcaaacaggattagataccctggtagtccacgccgtaaacgatgtcgacttggaggttgtgcccttgaggcgtggcttccggagctaacgcgttaagtcgaccgcctggggagtacggccgcaaggttaaaactcaaatgaattgacgggggcccgcacaagcggtggagcatgtggtttaattcgatgcaacgcgaagaaccttacctggtcttgacatccacggaagttttcagagatgagaatgtgccttcgggaaccgtgagacaggtgctgcatggctgtcgtcagctcgtgttgtgaaatgttgggttaagtcccgcaacgagcgcaacccttatcctttgttgccagcggtccggccgggaactcaaaggagactgccagtgataaactggaggaaggtggggatgacgtcaagtcatcatggcccttacgaccagggctacacacgtgctacaatggcgcatacaaagagaagcgacctcgcgagagcaagcggacctcataaagtgcgtcgtagtccggattggagtctgcaactcgactccatgaagtcggaatcgctagtaatcgtggatcagaatgccacggtgaatacgttcccgggccttgtacacaccgcccgtcacaccatgggagtgggttgcaaaagaagtaggtagcttaaccttcgggagggcgcttaccactttgtgattcatgactggggtgaagtcgtaacaaggtaaccgtaggggaacctgcggttggatcacctccttaccttaaagaagcgttctttgcagtgctcacacagattgtctgatagaaagtgaaaagcaaggcgtcttgcgaagcagactgatacgtccccttcgtctagaggcccaggacaccgccctttcacggcggtaacaggggttcgaatcccctaggggacgccacttgctggtttgtgagtgaaagtcacctgccttaatatctcaaaactcatcttcgggtgatgtttgagatatttgctctttaaaaatctggatcaagctgaaaattgaaacactgaacaacgaaagttgttcgtgagtctctcaaattttcgcaacacgatgatgaatcgtaagaaacatcttcgggttgtgaggttaagcgactaagcgtacacggtggatgccctggcagtcagaggcgatgaaggacgtgctaatctgcgataagcgtcggtaaggtgatatgaaccgttataaccggcgatttccgaatggggaaacccagtgtgtttcgacacactatcattaactgaatccataggttaatgaggcgaaccgggggaactgaaacatctaagtaccccgaggaaaagaaatcaaccgagattcccccagtagcggcgagcgaacggggagcagcccagagcctgaatcagtgtgtgtgttagtggaagcgtctggaaaggcgcgcgatacagggtgacagccccgtacacaaaaatgcacatgctgtgagctcgatgagtagggcgggacacgtggtatcctgtctgaatatggggggaccatcctccaaggctaaatactcctgactgaccgatagtgaaccagtaccgtgagggaaaggcgaaaagaaccccggcgaggggagtgaaaaagaacctgaaaccgtgtacgtacaagcagtgggagcacgcttaggcgtgtgactgcgtaccttttgtataatgggtcagcgacttatattctgtagcaaggttaaccgaataggggagccgaagggaaaccgagtcttaactgggcgttaagttgcagggtatagacccgaaacccggtgatctagccatgggcaggttgaaggttgggtaacactaactggaggaccgaaccgactaatgttgaaaaattagcggatgacttgtggctgggggtgaaaggccaatcaaaccgggagatagctggttctccccgaaagctatttaggtagcgcctcgtgaattcatctccgggggtagagcactgtttcggcaagggggtcatcccgacttaccaacccgatgcaaactgcgaataccggagaatgttatcacgggagacacacggcgggtgctaacgtccgtcgtgaagagggaaacaacccagaccgccagctaaggtcccaaagtcatggttaagtgggaaacgatgtgggaaggcccagacagccaggatgttggcttagaagcagccatcatttaaagaaagcgtaatagctcactggtcgagtcggcctgcgcggaagatgtaacggggctaaaccatgcaccgaagctgcggcagcgacgcttatgcgttgttgggtaggggagcgttctgtaagcctgcgaaggtgtgctgtgaggcatgctggaggtatcagaagtgcgaatgctgacataagtaacgataaagcgggtgaaaagcccgctcgccggaagaccaagggttcctgtccaacgttaatcggggcagggtgagtcgacccctaaggcgaggccgaaaggcgtagtcgatgggaaacaggttaatattcctgtacttggtgttactgcgaaggggggacggagaaggctatgttggccgggcgacggttgtcccggtttaagcgtgtaggctggttttccaggcaaatccggaaaatcaaggctgaggcgtgatgacgaggcactacggtgctgaagcaacaaatgccctgcttccaggaaaagcctctaagcatcaggtaacatcaaatcgtaccccaaaccgacacaggtggtcaggtagagaataccaaggcgcttgagagaactcgggtgaaggaactaggcaaaatggtgccgtaacttcgggagaaggcacgctgatatgtaggtgaggtccctcgcggatggagctgaaatcagtcgaagataccagctggctgcaactgtttattaaaaacacagcactgtgcaaacacgaaagtggacgtatacggtgtgacgcctgcccggtgccggaaggttaattgatggggttagcgcaagcgaagctcttgatcgaagccccggtaaacggcggccgtaactataacggtcctaaggtagcgaaattccttgtcgggtaagttccgacctgcacgaatggcgtaatgatggccaggctgtctccacccgagactcagtgaaattgaactcgctgtgaagatgcagtgtacccgcggcaagacggaaagaccccgtgaacctttactatagcttgacactgaacattgagccttgatgtgtaggataggtgggaggctttgaagtgtggacgccagtctgcatggagccgaccttgaaataccaccctttaatgtttgatgttctaacgttgacccgtaatccgggttgcggacagtgtctggtgggtagtttgactggggcggtctcctcctaaagagtaacggaggagcacgaaggttggctaatcctggtcggacatcaggaggttagtgcaatggcataagccagcttgactgcgagcgtgacggcgcgagcaggtgcgaaagcaggtcatagtgatccggtggttctgaatggaagggccatcgctcaacggataaaaggtactccggggataacaggctgataccgcccaagagttcatatcgacggcggtgtttggcacctcgatgtcggctcatcacatcctggggctgaagtaggtcccaagggtatggctgttcgccatttaaagtggtacgcgagctgggtttagaacgtcgtgagacagttcggtccctatctgccgtgggcgctggagaactgaggggggctgctcctagtacgagaggaccggagtggacgcatcactggtgttcgggttgtcatgccaatggcactgcccggtagctaaatgcggaagagataagtgctgaaagcatctaagcacgaaacttgccccgagatgagttctccctgactccttgagagtcctgaaggaacgttgaagacgacgacgttgataggccgggtgtgtaagcgcagcgatgcgttgagctaaccggtactaatgaaccgtgaggcttaaccttacaacgccgaaggtgttttggcggattgagagaagattttcagcctgatacagattaaatcagaacgcagaagcggtctgataaaacagaatttgcctggcggcagtagcgcggtggtcccacctgaccccatgccgaactcagaagtgaaacgccgtagcgccgatggtagtgtggggtctccccatgcgagagtagggaactgccaggcatcaaattagaaaaaccccggtccataaggccggggttttttgcatatcaattatttgcatgatgaagggaatctcatgagtgttctgtatatccaaattcgtcgtaatcaaattactgttcgcgatcttgaaagcaaacgtgaagtgagtggagacgctgccttcagtaaccagcgcctgttaatcgccaatttctttgttgcagaaaaagttctgcaagatcttgttctgcaactccacccacgtagtacctggcattcttttttgccagcaaaacgtatggatattgttgtgagcgcactggaaatgaatgagggcggtttgagtcaggttgaggaacgcattctccatgaagtggtcgctggggcaacgttaatgaaatatcgccagttccacatccatgcgcaaagtgcggtactcagtgatagtgcggtcatggcaatgcttaagcagaaataatcgtgtcaccattggtgggtactaaacctgaagttcagcccaccgggatgagaaaaaatcgcttacgcccccacatacgccagattcagcaacggatacggtttccccaaatcgtccacctcagagcgtcccgtaaccttaaaacccaccttcttatagaacccaaccgcctgctcattttgctcattaacgttggttgtcagttccggtgccatgctgagcgcatgctccaccagcacccgacctacgccgcagccgcgcacatcaggatcgataaacagcgcatccatatgctgcccacttagcaacataaatccaaccggctgatcccgctcattaaccgcgacccacaacggcgcttccggcaggaaggaacgaactaggtcctccagctcggtccgatactctgcacttagaaaatcgtgagtggcatcgacagaacgacaccaaatcgcaacgagttcctccccttcctcatgccgactgcggcgaatactaataaccattttctctccttttagtcattcttatattctaacgtagtcttttccttgaaactttctcaccttcaacatgcaggctcgacattggcaaattttctggttatcttcagctatctggatgtctaaacgtataagcgtatgtagtgaggtaatcaggttatgccgattcgtgtgccggacgagctacccgccgtcaatttcttgcgtgaagaaaacgtctttgtgatgacaacttctcgtgcgtctggtcaggaaattcgtccacttaaggttctgatccttaacctgatgccgaagaagattgaaactgaaaatcagtttctgcgcctgcttagtaacagtcctttgcaggtcgatattcagctgttgcgcatcgattcccgtgaaagccgcaacacgcccgcagagcatctgaacaacttctactgtaactttgaagatattcaggatcagaactttgacggtttgattgtaactggtgcgccgctgggcctggtggagtttaatgatgtcgcttactggccgcagatcaaacaggtgctggagtggagcaaagatcacgtcaccagcacgctgtttgtctgctgggcggtacaggccgcgctcaatatcctctacggcattcctaagcaaactcgcaccgaaaaactctctggcgtttacgagcatcatattctccatcctcatgcgcttctgacgcgtggctttgatgatagtttcctggcaccgcatagccgctatgctgactttccggcagcgttgattcgtgattacaccgatctggaaattctggcagagacggaagaaggggatgcatatctgtttgccagtaaagataagcgcattgcctttgtgacgggccatcccgaatatgatgcgcaaacgctggcgcaggaatttttccgcgatgtggaagccggactagacccggatgtaccgtataactatttcccgcacaatgatccgcaaaatacaccgcgagcgagctggcgtagtcacggtaatttactgtttaccaactggctcaactattacgtctaccagatcacgccatacgatctacggcacatgaatccaacgctggattaatcttctgtgatagtcgatcgttaagcgattcagcaccttacctcaggcaccttcgggtgccttttttatttccgaaacgtacctcagcaggtgaataaattttattcatattgttatcaacaagttatcaagtatttttaattaaaatggaaattgtttttgattttgcattttaaatgagtagtcttagttgtgctgaacgaaaagagcacaacgatccttcgttcacagtggggaagttttcggatccatgacgaggagctgcacgatgactgaacaggcaacaacaaccgatgaactggctttcacaaggccgtatggcgagcaggagaagcaaattcttactgccgaagcggtagaatttctgactgagctggtgacgcattttacgccacaacgcaataaacttctggcagcgcgcattcagcagcagcaagatattgataacggaacgttgcctgattttattagcgaaacagcttccattcgcgatgctgattggaaaattcgcgggattcctgcggacttagaagaccgccgcgtagagataactggcccggtagagcgcaagatggtgatcaacgcgctcaacgccaatgtgaaagtctttatggccgatttcgaagatagtctggcaccagactggaacaaagtgatcgacgggcaaattaacctgcgtgatgcggttaacggcaccatcagttacaccaatgaagcaggcaaaatttaccagctcaagcccaatccagcggttttgatttgtcgggtacgcggtctgcacttgccggaaaaacatgtcacctggcgtggtgaggcaatccccggcagcctgtttgattttgcgctctatttcttccacaactatcaggcactgttggcaaagggcagtggtccctatttctatctgccgaaaacccagtcctggcaggaagcggcctggtggagcgaagtcttcagctatgcagaagatcgctttaatctgccgcgcggcaccatcaaggcgacgttgctgattgaaacgctgcccgccgtgttccagatggatgaaatccttcacgcgctgcgtgaccatattgttggtctgaactgcggtcgttgggattacatcttcagctatatcaaaacgttgaaaaactatcccgatcgcgtcctgccagacagacaggcagtgacgatggataaaccattcctgaatgcttacagtcgcctgttgattaaaacctgccataaacgcggtgcttttgcgatgggcggcatggcggcgtttattccgagcaaagatgaagagcacaataaccaggtgctcaacaaagtaaaagcggataaaagcctggaagccaataacggtcacgatggcacatggatcgctcacccaggccttgcggacacggcaatggcggtattcaacgacattctcggctcccgtaaaaatcagcttgaagtgatgcgcgaacaagacgcgccgattactgccgatcagctgctggcaccttgtgatggtgaacgcaccgaagaaggtatgcgcgccaacattcgcgtggctgtgcagtacatcgaagcgtggatctctggcaacggctgtgtgccgatttatggcctgatggaagatgcggcgacggctgaaatttcccgtaccagcatctggcagtggatccatcatcaaaaaacgttgagcaatggcaaaccggtgaccaaagccttgttccgccagatgctgggcgaagagatgaaagtcattgccagcgaactgggcgaagaacgtttctcccaggggcgttttgacgatgccgcacgcttgatggaacagatcaccacttccgatgagttaattgatttcctgaccctgccaggctaccgcctgttagcgtaaaccaccacataactatggagcatctgcacatgaaaacccgtacacaacaaattgaagaattacagaaagagtggactcaaccgcgttgggaaggcattactcgcccatacagtgcggaagatgtggtgaaattacgcggtagtgtcaatcctgaatgcacgctggcgcaactgggcgcagcgaaaatgtggcgtctgctgcacggtgagagcaaaaaaggctacatcaacagcctcggcgcactgactggcggtcaggcgctgcaacaggcgaaagcgggtattgaagcagtctatctgagcggatggcaggtagcggcggacgctaacctggcggccagcatgtatccggatcagagcctctatccggcaaacagcgtgccagctgtggtggagcggatcaacaacaccttccgtcgtgccgatcagatccaatggtccgcgggcattgagccgggcgatccgcgctatgtcgattacttcctgccgatcgttgccgatgcggaagccggttttggcggtgtcctgaatgcctttgaactgatgaaagcgatgattgaagccggtgcagcggcagttcacttcgaagatcagctggcgagtgtgaagaaatgcggtcacatgggcggcaaagttttagtgccaactcaggaagctattcagaaactggtcgcggcgcgtctggcagctgacgtgacgggcgttccaaccctgctggttgcccgtaccgatgctgatgcggcggatctgatcacctccgattgcgacccgtatgacagcgaatttattaccggcgagcgtaccagtgaaggcttcttccgtactcatgcgggcattgagcaagcgatcagccgtggcctggcgtatgcgccatatgctgacctggtctggtgtgaaacctccacgccggatctggaactggcgcgtcgctttgcacaagctatccacgcgaaatatccgggcaaactgctggcttataactgcagcccgagcttcaactggcagaaaaacctcgacgacaaaactattgccagcttccagcagcagctgagcgatatgggctacaagttccagttcatcaccctggcaggtatccacagcatgtggttcaacatgtttgacctggcaaacgcctatgcccagggcgagggtatgaagcactacgttgagaaagtgcagcagccggaatttgccgccgcgaaagatggctataccttcgtatctcaccagcaggaagtgggtacaggttacttcgataaagtgacgactattattcagggcggcacgtctagtgtcaccgcgctgaccggctccactgaagaaagccagttctaagcaacaacaaccgttgctgactgtaggccggataaggcgttcacgccgcatccggcaatcggtgcacgatgcctgatgcgacgcttgcgcgtcttatcatgcctacagccgttgccgaacgtaggctggataaggcgtttacgccgcatccggcaattctctgctcctgatgagggcgctaaatgccgcgtggcctggaattattgattgctcaaaccattttgcaaggcttcgatgctcagtatggtcgattcctcgaagtgacctccggtgcgcagcagcgtttcgaacaggccgactggcatgctgtccagcaggcgatgaaaaaccgtatccatctttacgatcatcacgttggtctggtcgtggagcaactgcgctgcattactaacggccaaagtacggacgcggcatttttactacgtgttaaagagcattacacccggctgttgccggattacccgcgcttcgagattgcggagagcttttttaactccgtgtactgtcggttatttgaccaccgcagccttactcccgagcggctttttatctttagctctcagccagagcgccgctttcgtaccattccccgcccgctggcgaaagactttcaccccgatcacggctgggaatctctactgatgcgcgttatcagcgacctaccgctgcgcctgcgctggcagaataaaagccgtgacatccattacattattcgccatctgacggaaacgctggggacagacaacctcgcggaaagtcatttacaggtggcgaacgaactgttttaccgcaataaagccgcctggctggtaggcaaactgatcacaccttccggcacattgccatttttgctgccgatccaccagacggacgacggcgagttatttattgatacctgcctgacgacgaccgccgaagcgagcattgtttttggctttgcgcgttcttattttatggtttatgcgccgctgcccgcagcgctggtcgagtggctacgggaaattctgccaggtaaaaccaccgctgaattgtatatggctatcggctgccagaagcacgccaaaaccgaaagctaccgcgaatatctcgtttatctacagggctgtaatgagcagttcattgaagcgccgggtattcgtggaatggtgatgttggtgtttacgctgccgggctttgatcgggtattcaaagtcatcaaagacaggttcgcgccgcagaaagagatgtctgccgctcacgttcgtgcctgctatcaactggtgaaagagcacgatcgcgtgggccgaatggcggacacccaggagtttgaaaactttgtgctggagaagcggcatatttccccggcattaatggaattactgcttcaggaagcagcggaaaaaatcaccgatctcggcgaacaaattgtgattcgccatctttatattgagcggcggatggtgccgctcaatatctggctggaacaagtggaaggtcagcagttgcgcgacgccattgaagaatacggtaacgctattcgccagcttgccgctgctaacattttccctggcgacatgctgtttaaaaacttcggtgtcacccgtcacgggcgtgtggttttttatgattacgatgaaatttgctacatgacggaagtgaatttccgcgacatcccgccgccgcgctatccggaagacgaacttgccagcgaaccgtggtacagcgtcagcccgggcgatgttttcccggaagagtttcgccactggctatgcgccgacccgcgtattggtccgctgtttgaagagatgcacgccgacctgttccgcgctgattactggcgcgcactacaaaaccgcatacgtgaagggcatgtggaagatgtttatgcgtatcggcgcaggcaaagatttagcgtacggtatggggagatgcttttttgagtaaagcttccatataatttttctccgcaatgtatcgagggttatccgtaaagccaaagctttcagccatcttatttaatgtattaaggattaattcagcaataacccggtgaccaaattcaaaagccaactcaaaggcagagtatttttgtggggctttgtgttgccaaaaatccataatatcttcagcggtaaatccaaacaggcgtgcatggtcagataaagcaagataaaccgtctctacaacattttgttgtttatgctgtatcgcactaaacaaaccgggatattcattagaattatttgccaggaggaggggcttcatattttttttatcgaatttaaacgtattaaacagagtgggtaatgcgttaaaaatagtattaataacgttcatgtgtccgcgctgcatggccataaacaaacccgtgtcgcgcgcaagacttttagcggtcagaagatctacaatatcggaagcactaatgttaatttcctgggctaggctgggcaatgcttcaagaataactttcacgatatcgctatgtccattttgcatcgccagatatagtcctgggcaaccataaaaatcctttgccttcaggagatcgagtacctgttctttagtcaaatgacatgtgcgaattaacaaaggtaacgcgttcaaaacaattttcagcatgtcggcatcaccattcgccataacatggtataaaacatggctggacgttctatttttggcactcaggaatttatacacttgttcgttatctaaatgatgtgttgcggccagtttaggtaaggcgttcagaatgctggttacaacatttttatccttacgacttatcgctaaaaataatccagaaaaaccatttttatcttttgcctccagaatatgcatgagattttttttgctgagtaatccttcatatcctgtttcactcaaactattgaaaatagtctcaacgatatccgcattaccataatttatagccaaatataaacctggcaggttaatactattataggcagtcaacatttctgttctatgtagttctggcattttctggagttgaatcatcagttgcgtaagttggtgattctgaccaattgccattagcaaattcatcgttgcaggacttaatggaggggttatttcatccacagatccttttaacatcaatagctgttctttcggaagtgctggaattattgcaacagattgattaataacatgatcattactccatttcaggaggctataatctacattcataaaatccatcagagaatagtgtttaatattctctttgctttcgctcataattcttattttatcgttagttacattaggatcataaacgctaaccacgtaatgggtacatccttcagttgtgttctttattcttagccggaccgtcaaagcatggttatccaccagtaatatggctgccataacactgatgccattactttccatcttgtcaaaatatgctttcataactagcccgaaatcaccgcaggcagcaacgcaacgcccctcaggacggctggaaaccaacgccaaagtctggtttttgcattttttgttgaagtgcgtgagaaatttttcagcactagagtaatcatcttgatggggtttgtaatcaacattctgataaatatcattaatatattgtgcagcaatgtgtcggcatactatacggttttggggtcgccccggaaaataacattgaccattaagtttaattcttgggaattctttttcttttctatcactttttaggtttaattcttgtttatcaagagtgtcactgcgttgaggtaaaatttccattaggtatttttcaaatattggggcaatggtttgagtaagtgtcgtgttttcgtttttattaattatcgtaatttctttcttatcagcttgtaagacggacgtggaaaatttaatgacaaaatccttgttgctaaagatatgacgaccattttgtctacagttctcactgaagctttttaatagaggcgtcgccagctccttgccagaaaatttatcctcgagttctttataaaacaattcactcagggtttggtgttcatttgtctgggctgtattattaatatttgcagagaaagaactacgaggaatacgagtaatcatttaaatatctcattgtttattgatgtcttgaattttaactatcagaacagtgaaaaaatttaatatgattacaactaaagaaatatcataaatcgctcaatctcataatgcagccgtaaaagtttcggtggaatgagatcttgcgattttgttaataattaagtggtttgatgtttaaaaataatgctgagttaataaaagtgtgtgaagtgtatgacattaagttattttggcgtcaatgcgattaacagacacccttattctattgccactcaggtatgatgggcagaatattgcctctgcccgccagaaaaagtcagcgcattccaccgtacgccagcgtcacttccttcgccgctttaatcaccatcgcgccaaactcggtcacgcggtcatcggtaatacgactaatcggtccggaaatagaaattgcggcaaacggttcacggtgctcatcgaaaatacacgctgcaaggcaacgtagccccagtgcatgttcctcatcgtcaaaactataaccccgtttgcgcgtttgggcgagatcttcttttaaatgcacaggagacaccagcgttgcgtgggtataggcatgtaaccctttgcggtgcagcagcttcgtcacctgttcttcgctcagttgggctaaaaaggctttacccgcaccggaagcgtgcatcggcaatttaccgccgataggcgcggacattcgcatcagatgcgtacactgtacctggtcgataataatcgcttcgtgatcgctttgatcaagcaccgccatattgaccgtttcgccagactcttccattagattgcgcaggatagggtgaacaatcgctaacaaattacggctctggagaaagctgctgccgaccataaaggcatgtgcgccgattgcccaatgtcccagttcgccaacctgacgcacgaaaccctgctgttgcatcgtggttagcaggcggtgggtcgtggaattgggtaacccggcttgttgcgccagttccgtgagtgccacactgccattggattcggcaatccactccagtaatttcaggccacgcgttaaagactgaacctgtccagtcgctggtgcggtggcaacggcgggttttctgccgcgtttcgcgggaatgggtgcgaccatgacagtctcttttttctgtatcgtggaaatcattttcatttttattgttagctaatgcaatagttactgaactgatccgatgagttaatgttgaacaaatctcatgttgcgtggtggtcgcttttaccacagatgcgtttatgccagtatggtttgttgaatttttattaaatctgggttgagcgtgtcgggagcaagtgtgagcagcaaagtggaacaactgcgtgcgcagttaaatgaacgtattctggtgctggacggcggtatgggcaccatgatccagagttatcgactgaacgaagccgattttcgtggtgaacgctttgccgactggccatgcgacctcaaaggcaacaacgacctgctggtactcagtaaaccggaagtgatcgccgctatccacaacgcctactttgaagcgggcgcggatatcatcgaaaccaacaccttcaactccacgaccattgcgatggcggattaccagatggaatccctgagcgcggaaatcaactttgcggcggcgaaactggcgcgagcttgtgctgacgagtggaccgcgcgcacgccagagaaaccgcgctacgttgccggtgttctcggcccgaccaaccgcacggcgtctatttctccggacgtcaacgatccggcatttcgtaatatcacttttgacgggctggtggcggcttatcgagagtccaccaaagcgctggtggaaggtggcgcggatctgatcctgattgaaaccgttttcgacacccttaacgccaaagcggcggtatttgcggtgaaaacggagtttgaagcgctgggcgttgagctgccgattatgatctccggcaccatcaccgacgcctccgggcgcacgctctccgggcagaccaccgaagcattttacaacagtttgcgccacgccgaagctctgacctttggcctgaactgtgcgctggggcccgatgaactgcgccagtacgtgcaggagctgagtcggattgcggaatgctacgtcaccgcgcacccgaacgccgggctacccaacgcctttggtgagtacgatctcgacgccgacacgatggcaaaacagatacgtgaatgggcgcaagcgggttttctcaatatcgtcggcggctgctgtggcaccacgccacaacatattgcagcgatgagtcgtgcagtagaaggattagcgccgcgcaaactgccggaaattcccgtagcctgccgtttgtccggcctggagccgctgaacattggcgaagatagcctgtttgtgaacgtgggtgaacgcaccaacgtcaccggttccgctaagttcaagcgcctgatcaaagaagagaaatacagcgaggcgctggatgtcgcgcgtcaacaggtggaaaacggcgcgcagattatcgatatcaacatggatgaagggatgctcgatgccgaagcggcgatggtgcgttttctcaatctgattgccggtgaaccggatatcgctcgcgtgccgattatgatcgactccagtaaatgggacgtcattgaaaaaggtctgaagtgtatccagggcaaaggcattgttaactctatcagcatgaaagagggcgtcgatgcctttatccatcacgcgaaattgttgcgtcgctacggtgcggcagtggtggtaatggcctttgacgaacagggacaggccgatactcgcgcacggaaaatcgagatttgccgtcgggcgtacaaaatcctcaccgaagaggttggcttcccgccagaagatatcatcttcgacccaaacatcttcgcggtcgcaactggcattgaagagcacaacaactacgcgcaggactttatcggcgcgtgtgaagacatcaaacgcgaactgccgcacgcgctgatttccggcggcgtatctaacgtttctttcagcttccgtggcaacgatccggtgcgcgaagccattcacgcagtgttcctctactacgctattcgcaatggcatggatatggggatcgtcaacgccgggcaactggcgatttacgacgacctacccgctgaactgcgcgacgcggtggaagatgtgattcttaatcgtcgcgacgatggcaccgagcgtttactggagcttgccgagaaatatcgcggcagcaaaaccgacgacaccgccaacgcccagcaggcggagtggcgcagctgggaagtgaataaacgtctggaatacagcctggtcaaaggcattaccgagtttatcgagcaggataccgaagaagcccgccagcaggctacgcgcccgattgaagtgattgaaggcccgttgatggacggcatgaatgtggtcggcgacctgtttggcgaagggaaaatgttcctgccacaggtggtcaaaagcgcgcgcgtcatgaaacaggcggtggcctacctcgaaccgtttattgaagccagcaaagagcagggcaaaaccaacggcaagatggtgatcgccaccgtgaagggcgacgtccacgacatcggtaaaaatatcgttggtgtggtgctgcaatgtaacaactacgaaattgtcgatctcggcgttatggtgcctgcggaaaaaattctccgtaccgctaaagaagtgaatgctgatctgattggccttagcgggcttatcacgccgagcctggacgagatggttaacgtggcgaaagagatggagcgtcagggcttcactattccgttactgattggcggcgcgacgaccagtaaagcgcacacggcggtgaaaatcgagcagaactacagcggcccgacggtgtatgtgcagaatgccagccgtaccgttggtgtggtggcggcgctgctttccgatacccagcgtgatgattttgtcgctcgtacccgcaaggagtacgaaaccgtacgtattcagcacgggcgcaagaaaccgcgcacaccaccggtcacgctggaagcggcgcgcgataacgatttcgcttttgactggcaggcttacacgccgccggtggcgcaccgtctcggcgtgcaggaagtcgaagccagcatcgaaacgctgcgtaattacatcgactggacaccgttctttatgacctggagcctggccgggaagtatccgcgcattctggaagatgaagtggtgggcgttgaggcgcagcggctgtttaaagacgccaacgacatgctggataaattaagcgccgagaaaacgctgaatccgcgtggcgtggtgggcctgttcccggcaaaccgtgtgggcgatgacattgaaatctaccgtgacgaaacgcgtacccatgtgatcaacgtcagccaccatctgcgtcaacagaccgaaaaaacaggcttcgctaactactgtctcgctgacttcgttgcgccgaagctttctggtaaagcagattacatcggcgcatttgccgtgactggcgggctggaagaggacgcactggctgatgcctttgaagcgcagcacgatgattacaacaaaatcatggtgaaagcgcttgccgaccgtttagccgaagcctttgcggagtatctccatgagcgtgtgcgtaaagtctactggggctatgcgccgaacgagaacctcagcaacgaagagctgatccgcgaaaactaccagggcatccgtccggcaccgggctatccggcctgcccggaacatacggaaaaagccaccatctgggagctgctggaagtggaaaaacacactggcatgaaactcacagaatctttcgccatgtggcccggtgcaagcgttagcggttggtacttcagccacccggacagcaagtactacgctgtagcacaaattcagcgcgatcaggttgaagattatgcccgccgtaaaggtatgagcgttaccgaagttgagcgctggctggcaccgaatctggggtatgacgcggactgattcacaaatctgtcacttttccttacaacaaacagggcgctcaatgagtgccctgtctctttattaatatgaaacacttatactggaaacaggctggaataatcttagccggaaaaacgaatgtcaaaaggcacagtaaagatgccagtcagcgtgtttccggtcctttggtcattcaattgcttcaggaacatataacgataaggagaacctgaactcgtgttaacgctgcttcacctgctttctgccgtcgccctgctggtctgggggactcatattgttcgaaccggcgtaatgcgcgtcttcggcgcgcgtttgcgtactgtccttagccggagcgtcgaaaaaaagccgctcgccttttgcgcggggatcggcgttaccgcactggtacagagcagtaatgccaccaccatgctggtgaccagctttgtcgctcaggatctggtagccctcgcaccggctctggtcattgtgctgggtgcagatgtcgggacggcgctaatggcgcgtattctcaccttcgacttatcctggctgagtccgttacttatttttatcggcgtgatttttttcctcggacgcaaacagagtcgcgccgggcaactgggccgcgtcggtattggtcttgggctgattttgctagcgctggagttgattgtgcaggccgtaacgccgatcacccaggcaaacggcgttcaggtgatctttgccagcctgaccggcgatattctgctggatgcgctgattggcgcgatgttcgccattatcagctactccagccttgctgctgtactgctgaccgcgactctgaccgccgcaggcattatctccttccccgtggcgctctgtctggtgattggtgctaacctcggttccggtctgctggcaatgctcaacaacagtgccgccaatgccgcagcccgccgtgtcgcgctgggtagtctgctgtttaagctggtgggtagcctgattatcctgccgtttgtccatttgctggcagagacaatggggaagttgagtttgccaaaagcggaactggtgatctatttccacgtcttctacaaccttgtacgttgcctggtcatgctgccatttgttgacccgatggcacggttttgcaaaacgattattcgcgatgaaccggaactggatacccagctacggcctaaacatctggatgtcagcgcgctggatacgcccacgcttgctctggcgaacgccgcgcgcgaaaccctgcgcattggcgacgccatggaacagatgatggaagggttgaataaagtgatgcacggtgagccacggcaggagaaagagctgcgtaagctggcagatgatatcaacgttctctacaccgccattaagctgtatctggcgcggatgccaaaagaagagctggcggaggaagagagccgccgctgggcagagatcatcgaaatgagcctcaaccttgaacaggcctccgatatcgtcgagcgcatgggcagcgaaattgctgacaaaagtctggcagcacggcgggcatttagccttgatgggttgaaggaactggatgcgctctatgagcaattgctcagtaatttaaagctggcaatgagcgtgttcttctctggcgatgtcaccagcgctcgtcgtttgcgtcgcagcaaacatcgttttcgcattcttaatcgccgctattcccacgcccacgtcgatcgcctgcatcagcaaaacgtgcagagcattgaaaccagtagcctacatttaggcttactgggagatatgcagcgcctgaacagcctgttttgtagcgtggcttacagtgtgctggaacagccggatgaagatgaaggacgggacgagtattaatattgtgaatcctgtaggcctgataagacgcgtcaagcgtcgcatcaggcactatgaacaagatgccggatcatgcatccggcaattcacttaaaaacggtgaccagcttccagcggaaccgcttcttcaccagccttaaacacataagtggtgttcgggccacccagcgtagcgtgacctttactcactgtgatccagttaccttccggtagaccaataatcgtcagttctggcgcgacgaccagcagttcgcgaatacgctgctcacgggtttcacctttatggccttccggcagcgcgttggtgaagtgcgggttgatttgcagcgggaacagatttagcgcatcgaaaccttgcggatcgacaatcggcatatcgttggtggtacgaatagttgggcaagcaaggttagcgcctgcgctccagccaatatacagagcgccacgtttaaccacgtcagtaattggtgccagcagcccgcgctcgcggcactgtttcagcaactggaaagtattcccgccgccgacaatcacgatctcagcattttcaatcgcggcaacgggatcgacaacgctatgaataccggtgacagaaacacccagcggagcgagaaccgcagccgttttcgctgtgtaatcatcccaggtctgcgttacgccagcgaaagggataaacaccgcactgcggcgaccctgcaactgttcagcaattagcggcagtgcatgttccagccaggctttacccggcagcgtgctgttactcaataaaagcagttccattacttctccggttagtaagaaatcacgggaggcatgctaccactgcgaatttaaccacttactgacatggctcacgatgtcgcacattgcttctggaaagtgatttgagcaggtaacgaattcaagccaatggaaataacaaatagttcgctcatgactattttttatcaacccaaaggtacggtatattccgttttttacaggagaatttatgctgcccgacagtagtgtccgtttaaataaatacatcagcgaaagcggaatttgcagtcgccgcgaagcggatcgctatatcgagcaaggcaatgtgttccttaatggcaagcgagccaccattggcgatcaggtgaaacccggcgacgttgtgaaagtaaacggtcagttgattgaacctcgggaagccgaagatttggtacttatcgccctgaacaagcccgttggtattgtaagcaccaccgaagatggcgagcgcgataacattgtcgatttcgttaaccacagcaaacgcgtgttcccgattggccgcctggataaagactcccaggggctgattttcctcaccaatcacggcgatctggtgaataagatcctgcgtgctggcaatgatcatgagaaagagtatctggtgacggtcgataaaccgattaccgaggagtttattcgcggcatgagtgcgggggtgccaatcctcgggacagtgaccaaaaagtgcaaagttaaaaaagaagcgccgtttgtcttccgcattaccctggtgcaggggctgaaccgtcagatccggcgcatgtgcgagcatttcggctatgaagtgaaaaagctggaacgcacgcgcatcatgaacgttagcttaagcggcattccgctgggggaatggcgcgatttaaccgacgatgagttaatcgacctctttaagctcattgaaaattcctcttccgaggtaaaacctaaagcgaaggccaaaccgaaaacagcgggcatcaaacgtccagtcgttaagatggaaaaaacggcggaaaaaggcggtcgcccggcgtccaacggtaagcgttttaccagcccggggcgtaaaaagaaggggcgctgattaacgcctcagactgatgaaaacggcccaaaagtgcccggacagtcccctcgccccttcgggaaaagggttagggtgaggggaaaattgtgttcacactgacgagtgaaaatctcaggcgttgattgtggattagcgcctgccgcgcgtgctcgtatttgcactccagctaaaactcgcttcaggatccggtttataagcctgctttttcttcaactggcgggcttttttcgcttcagcctcacgctcaaccattaatttatcgatgtaatctttcttaatgctgttggtttcggagttggtcaatacgcgaccatgcgcaatccgcgcccgatccagcagtgttttaagttcacgctgctcgcgttcagtcatctctttttgggtaatacgggggagtgccatgatggtgccctcagtgagccagagagttcagtgtacgggaattcgtttgcgagcagaactgataatattcattttgccttctcttaactatttatctctttcgataattaattagagatgcagataaaaaaattaaaggcaattattctccgataaagacgctggttaacagagtacaggctcgtttattgatgagcatagtgacaagaaaatcaatacggcccgaaatatagcttccaggccatacagtatttactcaaacaaattactatgcagtttttgcaccacctgctcggcatcttcgccgggcaccaggaagcacaggttatggctggatgcgccataacaaatcatgcgaatgttgaacggttccagtacgccgaatacctctttgccaacgccgcaggctttactcaggtcattgccaatcaacgcgaccagcgccagaccttcttccacctccacccgacacagtgcggaaagctccatcagcagagattgcgtcagcaacgtatcgccagtggaggtactaccggtggtatcaagggttaatgccacgctcacttcactcgtggtgattaagtctacgctaatattatgccgcgcgaggatgccgaaaacttccgcgaggaaaccgcgagaatgcagcatattcaggctgtgcaaagtgagcagagtctgattgcgacgaagcgccagagcgcggaacagcggcggattttcagttttattgcacaccagcgtaccacctgcgcgtgggtctttgctggagccgacaaagaccgggatatcgctgcgtactgcgggtagcaacgttgccggatgcagtacttttgcaccaaaagttgccatctctgccgcttcggcaaacgcgatttcatcaatgcgttttgctgcggaaactacgcgtggatcggtggtgtagatgcccgggacgtcggtccagatatcaacacgagatgcgtgtaaagcctccgccagcaaggctgccgtataatcgctgcctccacggccaagcgtcgttgtacgacctttattttcgctaccgataaatccctgggtgatcactaagccttcattgagacgtgggagcagctgcagcgcggccagttccgccagcgcggctatatctggctctgcacgaccaaatcggtcgttggtacgcatcactttacgtacatcaaaccactgtgcctgaacatcgcgttcgcgcaggatctcaacaaacagcagggtgctcatcagctcgccgtggctgaccagctcatctgtcagcgccggagacgttgccagcgccgccgcttctgccagaacagtaatgttctccagcagacgttcaatctcttcacggataacgttcgggtaacgcagacgttccagaatggcaaactggatgttgcggatagcgtcgagtttttcgaatcgctcgccaggttccagtccttcagctaaagcgaccagcagattagtgataccagcagaagcgctgaggacaactaaacgcacgttggcatcagaaagcacaatatcagcgctgcggttcatggcgtcaaaatcagctacgctggtaccgccaaatttggagacaacaatttcagacataactacctcgtgtcaggggatccattttcagccttggcacaagggaagagcggaagacgggtgggcgcagagcgatacttcgctactattttcacccagaagtgctccaccacttgcgaaacgcccgactgcgaacgcttctggtgacaacccaggggattcagcccctgtagccgatgatgaacgtggccagccgttcaatcacctcggcgatgcaccccctcaggtgttatcacaggactggctcctccaacaccgttacttgggcaacgcgcctcttctggcctgcgctagcgcaggtagtacatttataaataaagggtgagcggggcggttgtcaacgatggggtcatgcggatttttcatccactcctggcggtcagtagttcagctaataaatgcttcactgcgctaagggtttacactcaacattacgctaacggcactaaaaccatcacatttttctgtgactggcgctacaatcttccaaagtcacaattctcaaaatcagaagagtattgctaatgaaaaacatcaatccaacgcagaccgctgcctggcaggcactacagaaacacttcgatgaaatgaaagacgttacgatcgccgatctttttgctaaagacggcgatcgtttttctaagttctccgcaaccttcgacgatcagatgctggtggattactccaaaaaccgcatcactgaagagacgctggcgaaattacaggatctggcgaaagagtgcgatctggcgggcgcgattaagagcatgttctctggcgagaagatcaaccgcactgaaaaccgcgccgtgctgcacgtagcgctgcgtaaccgtagcaataccccgattttggttgatggcaaagacgtaatgccggaagtcaacgcggtgctggagaagatgaaaaccttcagtgaagcgattatttccggtgagtggaaaggttataccggcaaagcaatcactgacgtagtgaacatcgggatcggcggttctgacctcggcccatacatggtgaccgaagctctgcgtccgtacaaaaaccacctgaacatgcactttgtttctaacgtcgatgggactcacatcgcggaagtgctgaaaaaagtaaacccggaaaccacgctgttcttggtagcatctaaaaccttcaccactcaggaaactatgaccaacgcccatagcgcgcgtgactggttcctgaaagcggcaggtgatgaaaaacacgttgcaaaacactttgcggcgctttccaccaatgccaaagccgttggcgagtttggtattgatactgccaacatgttcgagttctgggactgggttggcggccgttactctttgtggagtgcgattggcctgagcattgttctctccatcggctttgataacttcgttgaactgctttccggcgcacacgcgatggacaagcatttctccaccacgcctgccgagaaaaacctgcctgtactgctggcgctgattggcatctggtacaacaatttctttggtgcggaaactgaagcgattctgccgtatgaccagtatatgcaccgtttcgcggcgtacttccagcagggcaatatggagtccaacggtaagtatgttgaccgtaacggtaacgttgtggattaccagactggcccgattatctggggtgaaccaggcactaacggtcagcacgcgttctaccagctgatccaccagggaaccaaaatggtaccgtgcgatttcatcgctccggctatcacccataacccgctctctgatcatcaccagaaactgctgtctaacttcttcgcccagaccgaagcgctggcgtttggtaaatcccgcgaagtggttgagcaggaatatcgtgatcagggtaaagatccggcaacgcttgactacgtggtgccgttcaaagtattcgaaggtaaccgcccgaccaactccatcctgctgcgtgaaatcactccgttcagcctgggtgcgttgattgcgctgtatgagcacaaaatctttactcagggcgtgatcctgaacatcttcaccttcgaccagtggggcgtggaactgggtaaacagctggcgaaccgtattctgccagagctgaaagatgataaagaaatcagcagccacgatagcagcaccaatggtctgattaaccgctataaagcgtggcgcggttaatcatcgtcgatatgtaggccggataaggcgttcacgccgcatccggcaaccgatgcctgatgcgacgcggtcgcgtcttatcaggcctacaggtcgatgccgatatgtacatcgtattcggcaattaatacatagcacgattgattaaataaccttaataacaatgccgacgttatgtcggcatttttttatcagataaatccccttgtctgtaatttaacggaaatcataccgtgaggttaatcctaaaatagatttttaatcgttgtttatttcggaaaatacgcagattaattgcttttgtttttattttaagtttatgatttttattgttatttaaatataagttgaaacttatatttgatattcattccaattatcctaaaacgccatcgctaattccccgcgccgtaattcgcatgctttagttgtgtatactcgatcccgcccgaaatgtttttgggtaaatctccattcattcaatgaagggaaattgttatgaaaaaagttctgtatggcatttttgccatatctgcgcttgcggcgacttctgcgtgggctgcacctgtacaggtgggcgaagcggcagggagcgcagcaacgagcgttagcgcggggagttcctccgcgaccagcgtcagcaccgtaagcagcgcggtgggtgtcgcgcttgcggcaaccggtggcggtgatggttctaataccgggaccaccacaaccacgaccaccagtacccagtaataaagtatgtatccccaaaataattcgagtcattgcatctgtggctagaagtatgaagggattaaccataaccacactccggtgtggttattctgcccctctggagaagagtcgtgaagcgacctgcactcattcttatctgcctgttattacaggcctgtagtgccacgactaaagagctgggcaatagtctgtgggacagtctgttcggcacgccaggcgtacagctgacggatgatgatattcaaaatatgccctacgccagccagtacatgcagcttaatggcgggccgcagttatttgtggtgctggccttcgctgaagacggacaacaaaaatgggtcactcaggatcaggctactctcgttacccaacatggccgtctggtgaagactctgctcggcggcgacaacctgattgaagtgaataaccttgctgccgacccgctgattaaacccgcacaaatcgttgatggcgcaagctggacgcgcacgatgggctggaccgagtaccagcaggtacgctacgccaccgcacgcagtgtcttcaaatgggatggcaccgataccgtcaaagtcggcagcgatgaaaccccggttcgcgtgctggacgaagaagtctccaccgaccaggcgcgctggcataaccgctattggatcgacagcgaagggcaaattcgccagagcgaacagtatctcggcgcggattattttccggtgaaaaccactctcatcaaggcggcaaaacaatgattaaacaaactattgtcgcgttgcttttgagtgtgggagcgagtagcgtcttcgcggcaggaaccgtcaaggtgttcagcaatggcagcagtgaggccaaaacgctaacgggcgcagagcatttaatcgatctggtaggccaaccgcggctggcaaacagctggtggcccggtgcggtgattagcgaagagctggcaacggcggcagcattgcgtcagcagcaggcgttgctgacacggctggcagaacagggcgcagattccagcgccgacgatgccgctgcgattaacgccttacgccagcaaattcaggcgttgaaagtgacgggcaggcaaaaaatcaatcttgatcccgatatcgtccgcgttgccgaacgcggtaacccgccgttgcagggcaactacacgctgtgggtcggaccaccgccgtccacggtcacgttgttcgggcttatcagccgtcctggcaagcagccattcactccaggtcgcgacgtggcgagctatctctctgaccagagcctgctcagcggtgcggatcgcagctacgcgtgggtggtttacccggacggacgcacgcaaaaagcgccggtggcttactggaacaagcgtcacgtagagccgatgcccggcagcattatttatgttggcctcgcggactccgtctggagtgagacgcctgatgcccttaacgccgacattcttcagactctgacgcagcggatacctcaataatgaaaaaaagacatctgcttagcttactggcgctgggcattagcacagcttgctacggcgaaacatatcctgcgcccattggtccgagccagagcgatttcggtggcgtaggattattacaaacgcccaccgcgcgtatggcacgggaaggggagttgagtctgaactatcgcgataacgatcagtaccgttattacagtgctagtgtgcaactcttcccgtggctggaaacaacgctgcgctacaccgacgtgcgcacccggcagtacagcagcgtcgaagcgttctctggcgatcaaacgtataaagataaagccttcgatctcaaactgcgtttgtgggaagagagttactggctgccgcaagtggcggttggtgcgcgggatatcggcggtacggggctgtttgatgcggaatatcttgttgccagcaaagcctgggggccgttcgattttacgctcggcctgggctgggggtatttgggcaccagcggtaatgtgaaaaatccgctctgtagtgccagtgataaatattgctatcgcgataacagctacaaacaggcgggatctatcgacggtagccagatgttccacggtcctgccagtctgtttggcggcgtggaataccagacgccctggcaaccgctgcgcctgaaactggagtatgaaggcaataattatcagcaggattttgccgggaagctggagcaaaaaagtaagtttaacgtcggtgcgatttatcgcgttaccgattgggccgacgttaaccttagctatgaacgtggcaacacctttatgtttggcgttacgttgcgcaccaactttaacgatctgcgcccgtcttacaacgataacgcccgcccgcaatatcaaccgcagccgcaggatgccattttgcagcatagcgtggtggcgaatcagttaacgctgttgaaatacaatgccggacttgccgatccacagatccaggcgaaaggcgatacgctgtatgttaccggcgagcaggtgaaatatcgtgatagccgcgaagggatcatccgtgcgaatcggatcgtgatgaacgatctgccggatgggatcaaaacgatccgcattacggaaaatcgccttaacatgccgcaggtgacgacggaaaccgatgtcgccagcctgaaaaatcatctcgccggagagccgttgggccacgaaacgacgctggcgcaaaaacgcgtcgagccagtggttccgcagtccaccgagcagggctggtatatcgacaaaagtcgctttgatttccatatcgatccggtgctgaaccagagcgtcggtggcccggaaaacttttacatgtatcagctgggcgtgatgggaacggcagatttgtggctgacggaccatctgctgaccaccggcagcctgtttgcaaatcttgccaacaactacgacaagtttaactacactaatcctccgcaggacagccacttaccgcgcgtgcgtacccatgtgcgcgagtatgtgcagaacgatgtctatgtgaataacctgcaagccaactacttccagcatctgggcaacggcttctacggtcaggtctacggtggttatctcgaaaccatgtttggcggtgcgggggcagaagtgttgtatcgcccgctggacagcaactgggcgtttggtctggatgccaactacgttaaacagcgcgactggcgtagtgcaaaagatatgatgaaattcaccgactacagcgtgaaaaccggacatctgaccgcctactggacgccatctttcgctcaggatgtgttagttaaagccagcgtcgggcagtatctggcaggggataaaggcggcacgctggagatcgccaaacgctttgatagcggcgtggtggtgggtggctatgccacgatcactaatgttagcaaagaggagtacggcgaaggggacttcaccaaaggcgtgtatgtcagcgtaccgttggatctcttcagctctggcccgacacgcagccgtgcggcgattggctggacgccgctgacgcgtgacggtggtcagcaacttgggcgtaagttccagttgtatgacatgaccagcgaccgtagcgtcaatttccgctaagtcatgggaaaggtgccagttttcgcactcactggcaccttcattcttaatggcctgtcgagccatcaggaacgcagttcactcccggtttgcgatctggtgtgtaaaggcgaaaacattctgtcttcctgtccgtcgatatcggttgcaggtctggttgcctgagcgactgggccatcattgggctggagacattgctttgcggtaggtcggctttatcagcagtaccgagcggaccagcataagcaggaagaacagagactgataacatcaaagcagcaaaataaggcttcatttttaccacctttatcaggttacgtttcatttgttccagaggaacattgtcgatttttcgcgcattgctggtggctgggaatcacctgaatgggtgatttttgaattaccggctttggtgcggtttgtcttgccggatgcgccgccaggcgcggcttatccggcctacgggtaggtatatccggctttggtggaggcgcgctccaaatccaggttgaacaaaacatacacaaaaaatatagatctccgtcacatttttgcgttatacaggaagctcgccactgtgaaggaggtactgctatgacgagtctctctcgtccgcgcgtggagtttatctccaccattttgcagaccgtactcaatcttggcctgctgtgcctcggcctgattttggttgtcttcctcggcaaagaaacggtgcatctggctgatgtgctgttcgcgccagaacaaaccagcaaatatgagctggtagaaggactggtggtttactttctctatttcgaatttatcgcgctgattgtgaagtactttcagtccggttttcacttcccgctacgttactttgtctatattgggatcaccgccattgtgcgcttgatcatcgtcgatcataaaagcccactggatgtgttgatctacagcgctgcgatcctgttactggtgatcaccctgtggctgtgtaatagcaaacggctgaagcgggagtaaaaagtcagcacgccgaaatggcgcggcgtgctggacaggaagattacagcgtagcagtttgttgtgttttcttcgtttccggttcccagagcgcttccagctcctcaagggttttacctttggtttccgggacaaatttccacataaacagtgctgccagaacgcccatacaaccgtaaatccagtaggagaaaccgttgtggaaatgggccaccagccaggagtttttgtccatcatcgggaaggtccaggagacgaagtagttcgccagccactgggccgccaccgcgattgccagcgctttaccacgaatagcattcgggaagatttcgctcagcagtacccagcataccggaccccaggacatggcaaaggcggcaacatagaacagcatgctcagtagcgccacaatacccggtgcctgagtgtaaaacgcggtaccgaggctaaacataccgattgccattccgagtgcgccgataatttgcagtggcttacgaccaaatttatccaccgtcataattgccagaacggtgaaggtgaggttgataactccgacaataatggtctgcaacagcgcgatatccgtgctggcccccagcgttttgaacacttccggcgcgtagtacagcaccacattgatgccgacaaattgctggaagatggagagcattacgccgattacaatcacgcccacgccaaacatcagcagacgaccaccggttttgcggccatgatccagggagtgtttaatttcctgtactgcctgagttgcaagcgtgttgcccataattttgcgcaggataccttccgcctgttcttgcttgccgcggctcatcagccagcgaggactttctggcacggtatacagcagcattaagaacagcagtgcagggatacattcgctggcaaacatataacgccagccgtcagtattcagccagctggcatcaccggaacgggcaataaaatagtttacgcagtaaactaaaagttgcccgaaaataatcgcaaactggttaaaagagaccagtttcccgcgaatatgagctggagccagttccgcaatatacattgggctgagcatactggctaaaccaacgccaataccgccaataatgcgataaataacaaattccgggacataacctgccagataaacaggcacagtgttgtccgggtttatagaggtaaaaccaagttctggccaggcagaacctacaccagaaataaaaaacaggacagcagcaatcttaagactatcacgacgaccgaagcggttactgcaataaccaccgagggcaccgccgatgatgcaaccaatcagagcgctggccacgcaaaaccctaacagggagttggcagcggattcacttaagttttgtggagcaacaaagacggtattgagactctcaacagtaccggaaataacggcggtgtcgtagccaaataataaaccacctaatgtagcgactaaggtaatgctaaatatataactggaattatactgggtattcattcagacctgccttagaccattctgatcttttatcagtgcattgatgttggaattgtcaggcagttaaggcaattatcattttttacaatgcgtttacgtaatgtcttttctgtgatcttaattgtgataattatccaaaattgataaaaacaatactattgccgtgactcagagcacgaaagagaattatcgtaagtgggaaaacaaataacgtaaaaataataagctctatgatggaaatattaaccggcgaacgattcagattgcagacgaaagaaaaaaaggcgctccgtggagcgccgaataacagtcacaagttgggataacgtaagttgagggtgcagcggcataacattggcagaacaacatctttaacctttcacaccacctgccgtcaggccgttgaccagccagcgttgagccagcaagaagacgatggtgatcggtaatgcagacatcacggcagcggcggcaaagtcaccccacaggtagttttgcgggttgaggtattgctgcatccccacggccagggtgtagctgtttacgtcacgcagtaacaggctcgcgaccggaacttcagtaatggcagcgataaagctcaggatgaataccaccgccagaatcggtacactcagcggcaacaggacaaggcggaaggcctgccacggtgtcgcaccatccagcgcagcagcttcttccaggctactgtcgatggtttcgaaatagcctttgatggtccagacatgcagcgcaatcccacccagatacgcgaaaattacgccgccgtgagtattcaggccaatgaatggaatgtactcacccagacgatcaaacaacgcatacaacgcgaccagactaagtactgccgggaacatctggaaaatcagcattcctttcagcagcgtcgctttgcctggaaagcgcatacgggcgaaagcgtaggcgcaggtggtggagagcgccacaatgccaatcgcggaaatcccggcgacctttacgctgttccacagccacagcagtaccgggaatggcggtggcgtaatgcgaccatcagcctgttcaacgctaaaacctaacgccagtttccagtgatcccaggagatttgctccgggatcaggctgccggtcgcaaagtttccctgacgcaggctgatagcgacgaccatcagcagcgggaacataatcgctgcgataaaaagtagcagtagcaggtgagtaataaataaacgagctttttggcttttcggttggaccattgccatttttgttatctcccttaatcaaacttcattcgcgtggctttcaggttcactatcgccagcgcacccaccagcaggaagatcagcgtggcaattgctgccgccagaccgaagtcctgacccccgccgccttcaaaagcgatgcggtaggtgtagttaacaagcaggtcggtataaccggctggcgtggtcgtgccaagacgatccgggccgccgttggttaacagttgaatcagcacgaagttgttaaagttaaaggcgaagctggcgatcatcagcggcgtcagcggtttaatcagcagcggcagcgtaatcttaaagaagttctggaacggacctgcgccatccattgcactggcttcatacaaatcgtccggaatcgctttcagcaagcccatgcagaggatcatcatgtacggataacccagccaggtattgacgataattagcatcgtgcgggcggtggtcggatcgctgaaccaggcgggcttcacgccaaacagcgcgctcaacatcatgttgatttcaccgaagctctggttaaacaaccctttgaaaatcaagatactaatgaagcttggcaccgcgtagggcagaatcagcaggacgcgatagaccgctttgccgcgcaacgcttcccactgcaccagacacgccagaaccatgccgaccgccaccgttaaaaagacagtgatcaggctgaacaccacggtccagacgaaaatggcgaggaacggtttctgaatgccttcgtcggtaaagacgcgggtaaagtttttccagccggtggtcacggtgtaaccggggcttagcttttcatcaccccagttgccgtcggcggtaatggactggtaaaagccaatttggttattcggacgatatttcacgccgctctgattattcgtcaacgtgccgtcaccgtcgagtgtgtagagcggctgcgtgccagaaaactggcgcagggagctcatcatcactttgttgccatccggcagaatggcggtaatgtcactcagcgcctgacgattctgggtaatcacgcgcagattcgcgcgttcgccttcgggctgggcggtcgtttctttcagttgcagtttttgctcgccgccaaatttaaaagcgtcggagaggtaatttttgccggtttcgccgtcgctgagcgccagttgccactcatcgcccgccgggtaaagaccaaagttataggttttgcctgcttgccaggagcgatctaacaacacttcctgcgcacgttcaaaagtcagctggttagtgctgctgtagttggtgaaggcaatggcgatggtgcagaccagagggaagaggacgaataatcccattccagccattcccgggtaaacatagcgccaggcgtaggctttacgattggcgaaaatatacagccccgcactactcaatatcagcgtggtaatggcgaacaggtattccccttgtgcgtacattaaaacaacaaggtaacccaccagcaggccgagcagacctagcacactccatttcagcgcgtcgctttgccaccaatgtttctttttaatgacatccatggggttcttcctcattccaggacggataaggctttcacgccttatccgacaacaactgcctgatgcgacgctgacgcgtcttatcaggcctacatacgtttcggttttgtaggccggacaaggcgttcacgccgcatccggcatttcacagcattacttggtgatacgagtctgcgcgtctttcagggcttcatcgacagtctgacgaccgctggcggcgttgatcaccgcagtacgcacggcataccagaaagcggacatctgcgggatgttcggcatgatttcacctttctgggcgttttccatggtggcggcaatacgtggatctttcgccaactcttcctcgtaagacttcagcgctacggcacccagcggtttgtctttattaaccgcttccagaccttcatcagtcagcagatagttttcgaggaactctttcgccagctctttgttcggactggcggcgttaatacctgcgctcagcacgccaacgaacggtttggatggttgacccttgaaggtcggcagtaccgttacaccataattcactttgctggtgtcgatgttggaccatgcccacgggccgttgatggtcatcgctgtttcgcctttattaaaggcagcttctgcgatggagtaatcggtgtctgcattcatgtgtttgtttttaatcaggtcaaccaggaaggtcagacccgctttcgcgccagcgttatccacgcccacgtctttaatgtcgtacttgccgttttcatacttgaacgcataacccccgtcagcagcaatcagcggccaggtgaagtacggttcttgcaggttgaacatcagcgcgctcttacctttcgctttcagttctttatccagcgccgggatctcttcccaggtttttggcgggttcggcagcagatctttgttataaatcaggcttaacgcttcaacagcgatcgggtaagcaatcagcttgccgttgtaacgtacggcatcccaggtaaacggatacagcttgtcctggaacgctttgtccggggtgatttcagccaacaggccagattgagcgtagccaccaaagcggtcgtgtgcccagaagataatgtcagggccatcgccagttgccgcaacctgtgggaatttctcttccagtttatccggatgctcaacggtgactttaattccggtatctttctcgaatttcttaccgacttcagcgagaccgttatagcctttatcgccgttaatccagattaccagtttaccttcttcgattttggcgagagcgctggcggaaaacatcatcgtcgttaatgcggataatgcgaggatgcgtgcacctgtttttattttcataatctatggtccttgttggtgaagtgctcgtgaaaacacctaaacggactctagtttctttatacggcaacctctttccatcctccttgcccctacgccccaccgtcgctttgtgtgatctctgttacagaattggcggtaatgtggagatgcgcacataaaatcgccacgatttttgcaagcaacatcacgaaattccttacatgacctcggtttagttcacagaagccgtgttctcatcctcccgcctcctcccccataaaaaagccagggggtggaggatttaagccatctcctgatgacgcatagtcagcccatcatgaatgttgctgtcgatgacaggttgttacaaagggagaagggcatggcgagcgtacagctgcaaaatgtaacgaaagcctggggcgaggtcgtggtaagcaaagatatcaatctcgatatccatgaaggtgaattcgtggtgtttgtcggaccgtctggctgcggtaaaagcactttactgcgcatgattgccgggcttgagacgatcaccagcggcgacctgttcatcggtgagaaacggatgaatgacactccgccagcagaacgcggcgttggtatggtgtttcagtcttacgcgctctatccccacctgagtgtagcagaaaacatgagttttggcctgaaactggctggcgcaaaaaaagaggtgattaaccaacgcgttaaccaggtggcggaagtgctacaactggcgcatttgctggatcgcaaaccgaaagcgctctccggtggtcagcgtcagcgtgtggcgattggccgtacgctggtggccgagccaagcgtatttttgctcgatgaaccgctctccaacctcgatgctgcactgcgtgtgcaaatgcgtatcgaaatctcccgtctgcataaacgcctgggccgcacaatgatttacgtcacccacgatcaggtcgaagcgatgacgctggccgacaaaatcgtggtgctggacgccggtcgcgtggcgcaggttgggaaaccgctggagctgtaccactatccggcagaccgttttgtcgccggatttatcggtagcccaaagatgaacttcctgccggtaaaagtgaccgccaccgcaatcgatcaagtgcaggtggagctgccgatgccaaatcgtcagcaagtctggctgccagttgaaagccgtgatgtccaggttggagccaatatgagcctgggtattcgcccggaacatctactgccgagtgatatcgctgacgtcatccttgagggtgaagttcaggtcgtcgagcaactcggcaacgaaactcaaatccatatccagatcccttccattcgtcaaaacctggtgtaccgccagaacgacgtggtgttggtagaagaaggtgccacattcgctatcggcctgccgccagagcgttgccatctgttccgtgaggatggcactgcatgtcgtcgactgcataaggagccgggcgtttaagcaccccacaaaacacacaaagcctgtcacaggtgatgtgaaaaaagaaaagcaatgactcaggagatagaatgatgattactctgcgcaaacttcctctggcggttgccgtcgcagcgggcgtaatgtctgctcaggcaatggctgttgatttccacggctatgcacgttccggtattggttggacaggtagcggcggtgaacaacagtgtttccagactaccggtgctcaaagtaaataccgtcttggcaacgaatgtgaaacttatgctgaattaaaattgggtcaggaagtgtggaaagagggcgataagagcttctatttcgacactaacgtggcctattccgtcgcacaacagaatgactgggaagctaccgatccggccttccgtgaagcaaacgtgcagggtaaaaacctgatcgaatggctgccaggctccaccatctgggcaggtaagcgcttctaccaacgtcatgacgttcatatgatcgacttctactactgggatatttctggtcctggtgccggtctggaaaacatcgatgttggcttcggtaaactctctctggcagcaacccgctcctctgaagctggtggttcttcctctttcgccagcaacaatatttatgactataccaacgaaaccgcgaacgacgttttcgatgtgcgtttagcgcagatggaaatcaacccgggcggcacattagaactgggtgtcgactacggtcgtgccaacttgcgtgataactatcgtctggttgatggcgcaagcaaagacggctggttattcactgctgaacatactcagagtgtcctgaagggctttaacaagtttgttgttcagtacgctactgacagcatgaccagccagggtaaagggctgagccagggttctggcgttgcatttgataacgaaaaatttgcctacaatatcaacaacaacggtcacatgctgcgtatcctcgaccacggtgcgatctccatgggcgacaactgggacatgatgtacgtgggtatgtaccaggatatcaactgggataacgacaacggcaccaagtggtggaccgtcggtattcgcccgatgtacaagtggacgccaatcatgagcaccgtgatggaaatcggctacgacaacgtcgaatcccagcgcaccggcgacaagaacaatcagtacaaaattaccctcgcacaacaatggcaggctggcgacagcatctggagtcgcccggctattcgtgtcttcgcaacctacgccaagtgggatgagaaatggggttacgactacaccggtaacgctgataacaacgcgaacttcggcaaagccgttcctgctgatttcaacggcggcagcttcggtcgtggcgacagcgacgagtggaccttcggtgcccagatggaaatctggtggtaatagcaaaacctgggccggataaggcgtttacgccgcattcggcaaccaacgcctgatgcgacgcttgcgcgtcttatcaggcctacaacggctgtcaaatgtaggccggataaggcgtttacgccgcatccggcataaaaacaggttgtcattatctgaaaggggcgaaagcccctctgattatcgggtttagcgcgctattgcctggctaccgctgagctccagattttgaggtgaaaacaatgaaaatgaataaaagtctcatcgtcctctgtttaagtgcagggttactggcaagcgcgcctggaattagccttgccgatgttaactacgtaccgcaaaacaccagcgacgcgccagccattccatctgctgcgctgcaacaactcacctggacaccggtcgatcaatctaaaacccagaccacccaactggcgaccggcggccaacaactgaacgttcccggcatcagtggtccggttgctgcgtacagcgtcccggcaaacattggcgaactgaccctgacgctgaccagcgaagtgaacaaacaaaccagcgtttttgcgccgaacgtgctgattcttgatcagaacatgaccccaagtgccttcttccccagcagttatttcacctaccaggaaccaggcgtgatgagtgcagatcggctggaaggcgttatgcgcctgacaccggcgttggggcagcaaaaactttatgttctggtctttaccacggaaaaagatctccagcagacgacccaactgctcgacccggctaaagcctatgccaagggcgtcggtaacagcatcccggatatccccgatccggttgctcgtcataccaccgatggcttactgaaactgaaagtgaaaacgaactccagctccagcgtgttggtaggacctttatttggttcttccgctccagctccggttacggtaggtaacacggcggcaccagctgtggctgcacccgctccggcaccggtgaagaaaagcgagccgatgctcaacgacacggaaagttattttaataccgcgatcaaaaacgctgtcgcgaaaggtgatgttgataaggcgttaaaactgcttgatgaagctgaacgcctgggaagcacatctgcccgttccacctttatcagcagtgtaaaaggcaaggggtaattacgccccacagtgctgattttgcaacaactggtgcgtctcctggcgcacctttttttatgcttccttcctgggatatgagcgattttttatagtaactcacttcttcttcactaagaatatccattatctcaatgccttatcagagattcttttcctttcgccggtagtgtctggacattcaggctacttttccaggttattttatttctgttatgcagaggttttatgataagtcatatcctaaattctggcggcaataactctttgatgaaacatgatgtggtgcaaggaaataatatagtagatcttgatttactacgtaatttaaatggggtgccaggtttaaacagagataactttatttatatcagcaatattttttcaaatataaaacaacggaacgaaaaaatcatgcaataaatatgtttcgtgaagtctcaatcagtaatgatactataagtgtaaaattctacagaaatgaaaaaaattgaatgcgcttgcaattttctgatggataaagatgcgcaggggtatatcgacctgtctgatttggatttaacaagttgtcattttaaaggtgacgttataagcaaggtgtcttttttaagtagtaatctacaacatgtaacattcgaatgtaaagaaattggggattgcaattttactactgcaatagttgataatgtcatatttagatgtcgacgtttacacaatgtgatttttatcaaagcgagtggtgaatgtgtcgatttcagcaaaaatattcttgatacagttgacttcagccagagtcaacttggtcatagtaattttcgcgaatgtcagattagaaatagtaacttcgataattgttatctttacgctagccacttcaccagagcagagtttctgtctgccaaagaaataagttttattaaaagcaatttgacagctgttatgtttgattatgtgcgaatgagcacagggaattttaaagattgcattacagaacaattggaattaactattgattatagtgatatattttggaatgaagatctcgatggttatatcaataacattataaaaatgattgatacattgccagataatgcaatgatattgaaatccgttctggccgtaaaactggtgatgcaattaaaaatacttaatattgttaataaaaactttattgagaatatgaagaaaatatttagccattgtccttatataaaagatcccattatacgcagttatatccattctgatgaagataacaagttcgatgattttatgcgtcaacatcgattcagtgaggtgaatttcgatacccaacagatgatcgattttattaacagatttaatacgaataaatggctaattgataaaaataacaatttttttatccaacttatcgatcaggccttacgaagtacggatgatatgatcaaagcaaatgtttggcatctttataaagagtggattcgtagtgatgatgttagtcctatatttatagaaactgaagataatttaagaacctttaacacgaatgaattaacacgaaacgataatatctttatcctgttctccagtgtcgatgatgggccagttatggtggtaagctcccagcgcttacatgatatgttgaatcctacaaaagataccaattggaattccacgtatatctacaaatccagacatgagatgttgcctgttaatcttactcaggaaacacttttcagctccaaatctcatggtaaatatgcgcttttccccatttttactgcgagttggcgagctcatcgtataatgaataagggtgtttaagtaaaggaaaacatcaccgttcctggcatcctggacggtgatgcccctacggttgccctcgccagcacgggcatcggtaaagcgtaaggttcaacatcgttttaccacttcatgcgattgttgcgtttttgttgcgtattagatcacttaatttgctttacatctcccgtaaacacttttctgcgatacaatgcctttacgttatgtaacggagagttcggcatgagtcaccccgcgttaacgcaactgcgtgcgctgcgctattgtaaagagatccctgccctggatccgcaactgctcgactggctgttgctggaggattccatgacaaaacgttttgaacagcagggaaaaacggtaagcgtgacgatgatccgcgaagggtttgtcgagcagaatgaaatccccgaagaactgccgctgctgccgaaagagtctcgttactggttacgtgaaattttgttatgtgccgatggtgaaccgtggcttgccggtcgtaccgtcgttcctgtgagtacgttaagcgggccggagctggcgttacaaaaattgggtaaaacgccgttaggacgctatctgttcacaagtagcacattaacccgggactttattgagataggccgtgatgccgggctgtgggggcgacgttcccgcctgcgattaagcggtaaaccgctgttgctaacagaactgtttttaccggcgagtccgttgtactaagaggaaaaaaatatggagtggagtctgacgcagaataagctgctggcgtttcatcgcttaatgcgtacggataagccaattggcgcgttactgctgctctggccaacattatgggcgttgtgggtggcgacaccgggcgttccccagctctggatcctggcggtgtttgtcgcgggtgtctggctgatgcgcgctgccggatgtgtggtgaatgattatgctgaccgcaagtttgatggtcatgttaagcgcacggcgaaccgaccacttcccagcggcgcggtaacagagaaagaggcgcgcgcgctgtttgtcgtgctggtactgattagctttttactggtgctgacgctgaatacgatgaccattctgttgagcattgccgcgctagcgctggcgtgggtgtacccgtttatgaagcggtatacccatctaccgcaagtggtgctgggcgcggcgtttggctggagcattccaatggcttttgccgctgtgagtgagagcgtgccattgagttgctggttaatgttcctcgccaatattctctgggcggtggcttacgacacgcagtatgcgatggttgaccgcgatgatgatgtgaagattggcattaaatccacggcaatcctgttcggccaatacgataaattgattattggtattttgcagattggcgtactggcactgatggcgatcatcggtgagttaaatggcttaggctggggatattactggagtattctggtggctggcgcgctgtttgtttatcaacaaaaactgattgccaaccgcgagcgtgaagcctgctttaaagcatttatgaataataactatgttggtctggtactatttttagggctggcaatgagttactggcatttctgatgatgtaaaaaagccggatgatcatccggctttcttctgggttgcctgatgcgcggcgcttctcaggcctacacaacacatcgcaatttattgaatttgcagattatggaaggccggataaggcgttttcgccgcatccggcaattctctctgattacccttcgccctgcgtcgcactctcaatcgtcaaacgcacgtcacttgtaatcaactccgccagcaactgataaaccttcatcgtttctgccggttcggcatcgccgctatcgctgatatacccttcatcacgcagtgtcagcaccagagaactgaacaccgccttgtcgaagaactccggcgcgttgatgccgtgcagcacggagagacgttgcgcgacggtgcggctctctttctccagcgtaccgcggttgatgctcgggttggcactcaacaaccagaaggtgatggcataacgttgcagcgtttcgcgcgcgcctgcggccagcagctgtagcgtgcgagaatgcgccgggttgatatgcaactcatcatcttgcagggtaatcagcccctgacgttgcatctcatttgccagcgcatcaataacgtccggcaactcgtcgcgatcccagcgcaggaacagctccgctttcagcattgggtaaagcacattgacgtgctccatcaatacgtcgcgggagatgtggcgatgctgggtgacgattgccgccatcaggctaggcagcaccaacatatgcgcaatgttgttgcgatagtaggtcatcagcaccgcttgctcgcgcggcagaatgatgatgtcgccgattgtgtctttctcgacttcaaacttgttcatttgcagcgcgtgatcgataagctcgctggcgctggcactaggaacggtagagtccgtggagtagggcacgttgcgcatcagatccaggtagcagttgagttgctcggttaactgctcgcgggtgagactgcgctgacgacttgccagtagcgcagtacagcacaggttcatggcgtttgccgcgcctgcgttgttaatgcgtaccatcagatcggcagcaatattattgaccgtcggcgttaaccatgccggacgcaccgcttcgatgggatcgatagattcacgccagtcaggtacatgctggttaaggtaggtcatcaacggcattggttcaccgaagttgacgtaaccctgaccgagattacgcagcttgcttaaaccgcgcagcatctgcggcaggctctctttctctttcgtcgcgccgcgcagttctttggcgtaagtacccacttccatgacgtgctcataaccgatatagatcggaatcagcgtaatcggacgcgtgccgccacgcagcatcgcctgaatggtcatgctcagcgtaccagttttcggatccagcaaacgccccgtacgggaacgaccgccttccacgaagtactcgacggaataaccacggctgaacagttcgccgagatactcccggaaaacggtggaataaagtttattgcctttaaacgtacggcgaataaagaacgcccccagacggcggaaaatcggcccggcaggccagaaattcaggttgatcccggcggcgatatgcggcggcaccagcccctggtgatacagcacgtaagaaagcagcaggtagtccatgtgactgcggtggcaaggcacatataccagctcatgaccgtcgtgggccagctggcgaacgcgctcagcgttatggacgttgatgccctggtaaagtcggttccaggtgaagcccagaatacggtcagtcaggcgaatcatctcgtaagagaaattcgccgcaatctcttccatcagtgcaatcgcgttctgctgcgctttttcatgggagatttttttgctgcgcgcttcatcttctaccgctttggcaatggcgcgggaggcgagcagcttattaaacagatcctgacgagcaggcaaacgtgggcctacggcagccagacgttgacgggcaaagtgcatacgcgccacgcgcgccagtttctgagcgatagttttatccgtgccgtgttcatccgccatacggcgcaggctaacactcgggctgaaacgcacaaaactgtcgcgaccgagccacagtacagcgaaaaatttctgtacgccgttaagcatacgcagcggcgggttcacttcgcctttttcacgccccggcgcgcgaccaaacatcacgctcactggcaccatctgcacatccagatttgggttgctacggtgcaaatcgagatagtcgtggaacagcttaatagactcttctttcggcgtgtaataggtgaacacacgcggcccgccgtgaatgaacacatagcgcggcagtagcgtgccgtcgatttccagcggctctaacgggtcaggcaagtcatgtgccagacactgggcgcgcaacgtcagcaaatctgctttgctgttgtacggtaaaacgtacataattggacgagaggtatccagccccagttccggggcaggatctgccggaatagacttgctttttaccaggatgcttaatggtaaattcagtaatttgtagtaaattcgtggccagccggacataaacgatgtaaagcctctggttaataatgcaaatgcgcggcaaggatagcagaaagtcatgggaaattctgtggtatccgctcatgtttcgcgcggcgctacgcaaacccgaatcatcggatttaacggtacactgatattgacgctcataatgtaaaaaggttctttcaatggccaataataccactggattcacccgaattatcaaagctgctggctattcctggaaaggtttacgcgctgcatggatcaacgaagcggcattccgtcaggaaggcgtagcggtattgttggcggtggtcatcgcctgctggctggatgtggacgcgattacccgcgtgctgcttatcagctccgtgatgctggtgatgattgtggaaatcctcaatagcgccatcgaagcagtggttgaccgaattggctctgaataccatgagctttccggacgcgcaaaagatatgggatccgctgcggtgctgattgccattatcgtcgccgtgattacctggtgcattctgttatggagccattttggataacccttccagaattcgataaatctctggtttattgtgcagtttatggttccaaaatcgccttttgctgtatatactcacagcataactgtatatacacccagggggcggaatgaaagcgttaacggccaggcaacaagaggtgtttgatctcatccgtgatcacatcagccagacaggtatgccgccgacgcgtgcggaaatcgcgcagcgtttggggttccgttccccaaacgcggctgaagaacatctgaaggcgctggcacgcaaaggcgttattgaaattgtttccggcgcaagtcgcgggattcgtctgttgcaggaagaggaagaagggttgccgctggtaggtcgtgtggctgccggtgaaccacttctggcgcaacagcatattgaaggtcattatcaggtcgatccttccttattcaagccgaatgctgatttcctgctgcgcgtcagcgggatgagcatgaaagatatcggcattatggatggtgacttgctggcagtgcataaaactcaggatgtacgtaacggtcaggtcgttgtcgcacgtattgatgacgaagttaccgttaagcgcctgaaaaaacagggcaataaagtcgaactgttgccagaaaatagcgagtttaaaccaattgtcgttgaccttcgtcagcagagcttcaccattgaagggctggcggttggggttattcgcaacggcgactggctgtaacatatctctgagaccgcgatgccgcctggcgtcgcggtttgttttagttctctcttcatcaggcttgtctgcatggcattcctcactagttctgataaagcactctggcatctcgccttacccatgattttctccaatatcaccgttccgttgctgggactggtcgatacggcggtaattggtcatcttgatagcccggtttatttgggcggcgtggcggttggtgcaacggcgaccagctttctctttatgctgttgctgtttttacgcatgagcaccaccgggctgactgcgcaggcttatggtgccaaaaatcctcaggcattagcccgtacgctggtgcaaccgttgctgttggcgttgggggctggggcgttaattgcgctgctgcgtacgccgattatcgatctggcgctgcatattgttggcggtagtgaggcagtcctggaacaggcgcggcgctttcttgaaatccgctggttaagcgcaccggcgagcctggcgaatctggtattactcggttggttactcggcgtgcaatatgcccgtgcgccagtaattttgttagtggtcggcaatatcctcaacattgtgctggatgtctggctggtgatggggctgcatatgaacgtgcagggcgcggcgctggcgacggttattgcggaatatgcaacattgctgattggtctgctaatggtgcgtaaaatcctcaaactacgcggaatttccggcgaaatgctgaaaactgcctggcgaggaaacttccgtcgcttgctggcgcttaaccgcgatatcatgctgcgtagcctgttgttgcaactctgtttcggcgcgatcaccgtacttggcgcgcgactggggagtgacattatcgctgttaacgcggttctgatgacgctactcacctttaccgcctatgcgctggatggttttgcctacgcggttgaagcgcactccggtcaggcatacggtgcgcgcgacggtagccagttgctggatgtctggcgggcagcgtgccgccagagcgggatcgtagcgttactgtttagcgtggtttatttgctggctggggaacacatcattgcgttactgacgagcttaacccagattcagcagctggctgaccgctatcttatctggcaggtgattttgccggtggttggcgtctggtgttatctgctggacggcatgtttataggcgcaacgcgtgccaccgaaatgcgtaacagtatggcggtggccgccgcaggttttgcgctgacgctccttacgctgccgtggctgggtaatcatgctttgtggctggcattaaccgtctttctggcgttgcgcgggctttctctggcggctatctggcggcgtcactggcgcaatggtacctggtttgccgcaacgtgacggttaaaaattctgaataaataatcctaagccaaattgctgactacacttaatctcacgttcagaagaaaagtgaacgtactctcattcacaacctaacgatgaggtcttgattatgaataaagatgaagccggcggtaactggaaacagtttaaaggtaaagtgaaagagcaatggggcaaactgaccgatgatgatatgacgatcattgaaggtaaacgtgatcaactggtcggtaaaatccaggaacgttatggttatcagaaagatcaggcagaaaaagaggtcgtggattgggaaacccgcaatgaatatcgctggtaattaatccctcctgcccgacgtgtacaaggatgtacgccctcttaacgcggtttctttttcacctgcacagagtgatcatgctggcactgttcaggatgacgacacgcttccacttctacacatgccgcacagagcccatgtgcttcaatcacattatgccgcagggcaaaccccatttttgccgccagcgtatgcataatgtcttccacgccttctgcacactcttctttcactgcgccgcagcgatcgcaaataaacatggcactcgtatgggtgggctgatcgaacagatgacagagcacataactgttggtggattccaccttatgcacaaaaccttgctcaagcagaaaatccagcgcgcgataaaccgttggcggcttggcttgcggttcagcttcgcgcagtaaatcaagcagatcataagcgctgatagcgccatcctgcagactcatcaggcgcaacacttccaggcgctgtggggtcaggcgcacattacgctgcgcgcagattttttcagcctgcgctaataactcctgcgttgtggtcttttccatcgggcacctcaaagtgggggttaagaatgtccttactttaccatgttccaggaaaaacaccgagaacccttattgttgccgtaatgttgattttctgttttgtaggtaaggtgttatgttgccttgtcgtaccattatcaacacgataataattaataattcatttttaaataaattgcttcaagttaactcgctatttatttaactgggtttaaacgcatacctgtagttcagaaattatgagcgatttttgatagtgaccagatggcaaaagaattataaggaggacacggtacgacaaaaaaggtagatgaatcatgttgaagataatacccggtgcaactggatactttaataaaacactcaatagtaatcaattcgataatgaagatgcaatcaaagataaattagataatagaggtagtatcaaaggtaaattaaataatatatatggtaaatctattgattatgcagcgctgcgtcatcgggatataattattgcaaaaatagatttgtttattcaacgaatcacgcataatttatggcatgcacgtaaaaaaatgtgtttttaattgtgcaaataaatgatctcaaaatgtgggtcaataagtatattgacgattgcactgatgaggatttaaacgatcgtgactttattgcaagtgttgttgaccgggctatttttcatttcgcgattaatagtatatgtaatcctggggataataaagatgcaatgcccattgaacaatgtacttttgatgtagaaactaagaatgaccttccctccacggttcagctattttatgaggaatctaaggataatgaacctttagcgaatatacattttcaagcaataggttctggttttttaacgtttgttaatgcctgccaggaacatgatgacaacagcttaaaattatttgctagcctgttaattagtcttagttattctagtgcctacgcagatttaagtgaaacagtgtatattaatgaaaataatgagagctacctgaaagctcagtttgaaaaattatctcaacgtgatatgaagaagtacctgggagagatgaagcgtctggctgatgggggagaaatgaattttgatggctatctggataagatgagtcatctggtgaatgaaggaacgctcgatcctgatattttaagcaaaatgcgagatgctgcaccacaattaattagcttcgcgaagagctttgacccaaccagtaaggaagagattaaaatacttacagacacttctaaattaatttatgatttgttcggggttaaaagcgagaaataatatgtgaagttcttcgatagtatggaaggcattatataaaaggacccaatatttattgggttcttttttctctatcaatactattagcagggagatatatcaccagagtttaatgtgtgattttttatttatcgtcgaacctggattgtttatcattggccttaacaaagttaacggctaataagattatttccatcacttcgtgagagcttcatgccttgagaggatctcaattttcttttgcaatgagacaggcgcttcctgttgttatggtatagtaccccgctattgagcctcctgaatagtgatgctgaataacataaccccatgatatatcgataaaataatctctacatttgaaaatgcacggtaattctgaaatgcaaaaaatcaaccaaaccagcgcaatgcctgaaaaaactgacgttcactggagtggtcggtttagcgttgcaccaatgctcgactggacggacagacattgccgctatttcttgcgtctgctttcccgcaatacgttgctgtataccgaaatggtgaccacaggggcgattattcacggtaaaggtgattatctggcgtacagtgaagaagaacatccggtagcgttgcaactgggcggtagcgatccggcggcgctggcgcagtgtgcaaagctggcagaagcgcgcggatatgatgagatcaacctgaatgtcggctgcccgtctgaccgggtgcagaacggcatgtttggtgcgtgtctgatgggtaatgcgcagctggttgccgactgcgtgaaagcgatgcgcgatgtggtgagcattccggtgacggtgaaaacgcgtattggcatcgacgaccaggacagctatgaatttctctgcgatttcatcaataccgtttccggcaaaggcgagtgtgagatgttcatcatccacgcacgtaaagcctggcttagcgggttaagcccgaaagaaaaccgtgaaatcccgccgctcgattatccgcgtgtgtatcaactgaagcgtgactttccgcatctgacaatgagcattaacggtggtatcaagagcctggaagaggccaaagcacacctgcaacatatggatggcgtgatggtcgggcgcgaggcgtatcagaatccgggtattctggcggcggtagaccgggagatctttggttccagcgataccgatgccgatccggtggcggtagtgcgcgccatgtatccgtacattgagcgtgaactcagccaggggacgtatctcggccatattacccggcatatgttgggcttgttccagggtattcctggcgcgcggcagtggcggcgttatttaagtgaaaatgcccataaagcgggtgcagacattaatgtgctggaacacgcgctcaaactggtggcggataagcgttaacttttcaccaaaaagtagtcaaattcaccacgccctgcgcaccgtcgcggggcgttttgctgttaaatcaatagattatttttggcatgattcttgtaatgccagcaagagatttcatatttgggagagcatcatgctggaactactttttgtgattggcttttttgtcatgctgatggtcaccggcgttagcttgctgggcattatcgccgcgctggttgtggcgacggccattatgttcctcggcggtatgctggcattgatgattaagttgctgccgtggttactactggcgattgcggtggtgtgggttattaaggcgattaaagcaccaaaagtgccgaaatatcagcgttatgaccgctggcgttactaagggattgtgcggatgatcacaacctaaggttttatccttagaacaaaataggaattgataatcaaatctgtcactattgcgcctctaacagattcatcgtgctgtaccctacatacagccgaactataaaaagaaagggcttcccaggtggaagccctatttcttttatggaatcagcaggctggaaccttgcgtcgcccggctttccagaatctcatgcgcacgctgcgcatccttcagcggatatttctgctgctcggcgacatcgaccttaatcacaccgctggcaatcaaagagaacagttcattactggcctcggttaattcctcccgcgtggtgatatagccttgcagggaagggcgtgtcacatacaagctgcctttttgattgagaatgcctaagttcacaccggtaaccgcaccactactgttgccaaaactgaccattaagccgcggcgttgcaggcaatccaggctccgttcccaggtgtctctgcccacggaatcgtacaccacgcgcactttcttaccgccggtgatctcttttaaccgctcgaccagatcctcttcacgatagttaataacctgccacgcgcccgcttttagcgcgctctgcgctttttgcgcggttcctacggtgccgataagtttcgcgcccagggcttttgcccactggcaggcaattaagccaacgccgccagccgctgcgtggaacaggaactgttcatcgggtttaatttcataggttttgcgcagcagataataaaccgttaagcctttcaggaaggatgccgcagcttgctcaaaagaaattgccgcaggcagaatcgccgctttatccgcaataatgttatgcacagagctgtaagcgcctaacgcgctctgcgcatagactacacgatcgcctgccttaatatgctttacaccactgccgactttactcacgatgcctgctgcttcggtgcctaatccgctgggtaggcttggcggcgggtaaaggccgctgcggatatatgtgtcgataaaattgatgccgatggctttattttcgacctggatttcattctccgccggatcggcaggagtgaactctacggcttgaagtacttccgggccaccgtgcttgtgaaattcaattcgtgttgccatgtgtcctccagaacgtatcgtcagggtctgcttcatatgataaagtttcgacccattctttatctcggtaactccattcactatggcaggaaataaacccttcaacaaacagcaggctgaaccccgcgaacgcgatccacaagttgccgggctgaaagtgcctccgcacagcatcgaagcggagcagagcgtgttgggcggtttaatgctagataacgaacgctgggatgatgtagccgagcgtgtggtagcagacgatttttacacccgcccacaccgtcatatctttactgaaatggcgcgtttgcaggaaagcggtagccctatcgatctgattactcttgcggaaagcctggaacgccaggggcaactcgatagcgtcggtggttttgcttatctggcagagctgagtaaaaatacgccaagtgcggctaacatcagtgcctatgcggacatcgtgcgtgaacgtgccgttgtccgtgagatgatcagcgttgcgaatgagattgccgaagctggttttgatccgcaggggcgtaccagcgaagatctgctggatctggctgaatcccgcgtctttaaaattgccgaaagtcgtgcgaacaaagacgaagggccgaagaacatcgccgatgtgctcgacgcaaccgtggcgcgtattgagcagttgtttcagcagccacacgatggcgttaccggggtaaacaccggttatgacgatctcaacaaaaaaaccgctggcttgcagccgagcgatttgatcatcgtcgccgcgcgtccgagcatgggtaaaacaacatttgcgatgaacctcgtcgaaaacgcggcgatgttgcaggataaaccggtacttatcttcagcctggagatgccaagtgaacagatcatgatgcgttctctggcgagcctgagccgcgttgaccagactaaaatccgtaccgggcagctcgatgacgaagactgggcgcgcatttccggcaccatgggtattttgctcgaaaaacgcaatatctatatcgatgactcctccggcctgacgccaacggaagtgcgttcccgcgcacgccgtattgcccgtgaacacggcggcatcgggcttatcatgatcgactacctgcaactgatgcgcgtaccggcgctttccgataaccgtacgctggaaattgcagaaatctctcgcagcctgaaagcactggcgaaagaactgaacgtgccggtggtggcgctgtcccagttgaaccgttctctggaacaacgtgccgacaaacgcccggtcaactccgacctgcgtgaatctggctctatcgagcaggatgcggacttgatcatgtttatctatcgtgatgaggtgtatcacgaaaacagtgatttaaaaggcatcgcggaaattattatcggtaaacaacgtaacggcccaatcgggacggtacgcctgacctttaacggtcaatggagccgcttcgacaactatgcggggccgcagtacgacgacgaataataattattttatgaattaggtaattaaagcaaacacttatcaaggaacacaaatgcaagcggcaactgttgtgattaaccgccgcgctctgcgacacaacctgcaacgtcttcgtgaactggcccctgccagtaaaatggttgcggtggtgaaagcgaacgcttatggtcacggtcttcttgagaccgcgcgaacgctccccgatgctgacgcctttggcgtagcccgtctcgaagaagctctgcgactgcgtgcggggggaatcaccaaacctgtactgttactcgaaggcttttttgatgccagagatctgccgacgatttctgcgcaacattttcataccgccgtgcataacgaagaacagctggctgcgctggaagaggctagcctggacgagccggttaccgtctggatgaaactcgataccggtatgcaccgtctgggcgtaaggccggaacaggctgaggcgttttatcatcgcctgacccagtgcaaaaacgttcgtcagccggtgaatatcgtcagccattttgcgcgcgcggatgaaccaaaatgtggcgcaaccgagaaacaactcgctatctttaataccttttgcgaaggcaaacctggtcaacgttccattgccgcgagcggtggcattctgctgtggccacagagccattttgactgggtgcgcccgggcatcattctttatggcgtcagcccgctggaagatcgctccaccggtgccgattttggctgtcagccagtgatgagtctaacctccagcctgattgccgtgcgtgagcataaagccggagagcctgttggttatggtggaacctgggtaagcgaacgtgatacccgtcttggcgtagtcgcgatgggctatggcgatggttatccgcgcgccgcgccgtccggtacgccagtgctggtgaacggtcgcgaagtaccgattgtcgggcgcgtggcgatggatatgatctgcgtagacttaggtccacaggcgcaggacaaagccggggatccggtcattttatggggcgaaggtttgcccgtagaacgtatcgctgaaatgacgaaagtaagcgcttacgaacttattacgcgcctgactagtagggtcgcgatgaaatacgtggattaatcgttctgtaatatttgattgtctgtgccggatgcggcgtgaatgccttatccggccaataaaatcctaaaaattcaataagttgatgttctttcatgctcttataaaggtcgtgcctctggcggatgtacgtttgtcatgagtctcactctgttgctaattgccgttcgctcctgaacatccactcgatcttcgccttcttccggtttattgtgttttaaccacctgcccgtaaacctggagaaccatcgcgtgtttcaaaaagttgacgcctacgctggcgacccgattcttacgcttatggagcgttttaaagaagaccctcgcagcgacaaagtgaatttaagtatcggtctgtactacaacgaagacggaattattccacaactgcaagccgtggcggaggcggaagcgcgcctgaatgcgcagcctcatggcgctagcctttatttaccgatggaagggcttaactgctatcgccatgccattgcgccgctgctgtttggtgcggaccatccggtactgaaacaacagcgcgtagcaaccattcaaacccttggcggctccggggcattgaaagtgggcgcggatttcctgaaacgctacttcccggaaagtggcgtctgggtcagcgatcctacctgggaaaaccacgtagcaatattcgccggggctggattcgaagtgagtacttacccctggtatgacgaagcgactaacggcgtgcgctttaatgacctgttggcgacgctgaaaacattacctgcccgcagtattgtgttgctgcatccatgttgccacaacccaacgggtgccgatctcactaatgatcagtgggatgcggtgattgaaattctcaaagcccgcgagcttattccattcctcgatattgcctatcaaggatttggtgccggtatggaagaggatgcctacgctattcgcgccattgccagcgctggattacccgctctggtgagcaatagcttcagcaaaattttctccctttacggcgagcgcgtcggcggactttctgttatgtgtgaagatgccgaagccgctggccgcgtactggggcaattgaaagcaacagttcgccgcaactactccagcccgccgaattttggtgcgcaggtggtggctgcagtgctgaatgacgaggcattgaaagccagctggctggcggaagtagaagagatgcgtactcgcattctggcaatgcgtcaggaattggtgaaggtattaagcacagagatgccagaacgcaatttcgattatctgcttaatcagcgcggcatgttcagttataccggtttaagtgccgctcaggttgaccgactacgtgaagaatttggtgtctatctcatcgccagcggtcgcatgtgtgtcgccgggttaaatacggcaaatgtacaacgtgtggcaaaggcgtttgctgcggtgatgtaatgcaggaaagcaggctggagctacccagcctgcagtgaaattaaactgtcgtcgctttcactctttctttatagatgatttttttgatgccatcgttctacgtgagagataataaacgttgttagttcttttattgttaagcttatcccaattatctggaattccttatcctgtttttttgggtggagtaataatttctgcacatctaaccattattaaatttaataataagtatcgggtttgttacgatagaatatttctatatcctcaagaatatgctttgccttattgcctgtgactttctgagattcaattatagtatcgttaaattctaatgttaaagagaactcttttttccgctttgtgtaagtttaaccttatattgattaccaatatcaaataaaaaggtcctgtaatgagaataatcacctttaacctcctcggcaaaacagcaaagcgtgcaaatatacataaagtctttcttacccctgattttgttaactaaatcaataaatgcgtgaaaaactttacttgcaatagaacttgatacttcttctccaggtctaaaaaatcttttgcaatttttaactgtgtttctatgtataaaaagaaatctttggcataagagatatctttattatttagtgcatctagctcaacaggtaaagatgtcgttttgttgctattcacatatgatatattcatatcatcatctccatcgcgagtaataaaattaatcaccattgtagggtagggggctggtcaatcagaaatcatctttataaacttcgattgtttttgtaatgctgtatcattaagttcattaaatcgtacagcagataaatgttctatcaaatttcgctcatttgccgaggattcatcataataaacgtaaaattaatgtatccttacatcgagtaataaacattttttatacaaaaaaagacaggaacgtatttactgggttaaatataatcatcctgcttttcatcacaaaaaccgcagataatccttcctttccccggcagctggcgttatggtcagatggtttttgcaacaaatctcacaataaaaagtttcaacatactgactatttagggaaaaatatgcgcaagatcacacaggcaatcagtgccgtttgcttattgttcgctctaaacagttccgctgttgccctggccagttctcctagtccgcttaaccctgggactaacgttgccaggcttgctgaacaggcacccattcattgggttagcgtcgcacaaattgaaaatagcctcgcagggcgtccgccaatggcggtggggtttgatatcgatgacacggtacttttttccagtccgggcttctggcgcggcaaaaaaaccttcagcccagaaagcgaagattatctgaaaaatcctgtgttctgggaaaaaatgaacaatggctgggatgaattcagcattccaaaagaggtcgctcgccagctgattgatatgcatgtacgccgcggtgacgcgatcttctttgtgactggtcgtagcccgacgaaaacagaaacggttagtaaaacgctggcggataattttcatattcctgccaccaacatgaatccggtgatctttgcgggcgataaaccagggcaaaatacaaaaagccaatggctgcaggataaaaatatccgaattttttatggcgattctgataatgatattaccgccgcacgcgatgtcggcgctcgtggtatccgcattctgcgcgcctccaactctacctacaaacccttgccacaagcgggtgcgtttggtgaagaggtgatcgtcaatagtgaatactgacagagcgggagagcgtgatgctctcccgaatgctgtttttttaatcacacctttatcctttcgctgtcttgctgcaaactgattaagagagttttatcaaggagcagcacatgtggtatcaaaagacgctcacgcttagcgccaaatctcgtgggtttcatctggtaacggatgaaattctgaatcagctggctgatatgccgcgcgttaacatcggcttactgcatctgttgctgcaacatacctccgcctctctgacacttaatgagaactgcgatcccaccgtacgccacgacatggagcgttttttcctccgcaccgttcccgacaacggaaattatgagcatgactatgagggagcagacgatatgccttctcatatcaaatccagtatgctgggaacaagccttgtattgccggtgcataaagggcgtattcagaccggcacctggcaaggcatttggctgggggaacatcgcatccacggcggaagccgtcgcatcatcgcgacactacaaggggagtaaaaaatgaccattagcgagttgctacaatattgcatggcaaaaccaggcgcagaacagagcgtgcataatgactggaaagcgacgcagatcaaagtggaagatgtactgtttgcgatggtgaaagaagtagaaaatcgcccagctgttagcctgaaaaccagcccggagctggcggagctgctacgtcagcagcacagcgatgtgcgtccaagccgccatctgaataaagcgcactggagcaccgtgtatctcgacggtagcctgccagatagccaaatctattatctggtggatgcgtcttatcagcaggcggtgaatttactgccggaagaaaaacgtaaattgctggtgcaactctgaaaggaaaaggccgctcagaaagcggccttaacgattacagcatcggcttaaggaagcgtgccgtgtgacttgcttcgcactccgcgacggtttctggcgtaccggagacgaggatctcgccgccaccactgccgccttctggtcccaggtcgacaatccagtcagcggttttgatcacgtcgagattgtgctcaatcaccacaatggtgttgccctgatcgcgcagtttatgcagtacgtcgagcagttgctgaatatcggcgaagtgcagaccggtggtcggctcgtcgagaatatacagcgtctgcccggtgccgcgtttactcagttcacgcgccagcttcacgcgctgggcttcaccgccactaagggtggttgcggactgccccagtcgaatgtacgtcaggccaacgtccatcaacgtttgcagcttacgcgccagtgcaggtacggcatcaaagaactcacgcgcctcttcgatggtcatatccagcacttcgtggatggttttgcctttgtacttaatctccagcgtttcacggttatagcgtttacctttgcactggtcgcacggcacgtagatatccggcaggaagtgcatctccactttgatcacgccatcgccctgacaggcctcgcagcgtccgccacgaacgttaaagctgaaacgtcccggcgtatagccgcgcgcacgggattccggtacgcccgcaaacagttcgcgcacaggcgtaaacacgccggtataggtcgccgggttagaacgtggagtacgaccaattgggctttggtcgatatcgatcactttatcgaaatgctccagcccctgaatatcgcgatacggtgctggttcggcgatggtcgccccattcaactggcgttgggcaatcgggaacagtgtgtcgttaatcagcgtgcttttaccggaaccactaaccccggtgatgcaggtaaacagacccaccggcagcgtcagcgtcacgtccttcaggttgttgccgcgtgcgcctgtcagcttcagcactttttccggattcgccggaacgcgtttcttcggcacttcaatcttgcgtttgccgctcatgtactgcccggtcaagctctccggcaccgccataatcgcttccagcggaccttctgcgaccacttcaccgccgtgaacacctgcgcccgggccaatgtcgatcacatggtcagcggcgcgaattgcgtcttcgtcgtgctccaccacaatcacggtattaccgagatcgcgcagatggataagcgtacccaacaggcgctcgttatcacgctggtgcaggccgatagacggctcgtccagcacgtacataacgccaaccaggcccgcaccaatctggctcgccagacggatacgctgtgcttcaccgccagaaagcgtttctgcgctgcgggaaagcgtcaggtaattcaggccgacgttaacgaggaatttcagacgatcgccgatctctttaaggattttttctgcaatcttcgcccgctgacctgcgagtttgagattgttgaagaattccatcgcatgaccaatgctcatgtcggagatagcaggcagcggcgtattctcgacatacacgtggcgcgcttcccgacgcagacgcgtcccttcgcagctggcgcacggacgattactgataaacttggctaattcttcgcgtaccgcgctggattccgtctctttatagcggcgctccatattatgcagcacgccttcgaacggatgacgacgaatggaggtatcgccacgatcgttcatgtatttgaattcaatgttttctttgccagaaccgtacaacaccactttatgcacgttcgcgctcaggctgccccacggcgcttcgacgtcgaacttatagtgatctgccaggcttttcagcatctggaaataatagaagttgcggcgatcccagccacggatcgcaccaccagccaggctcagttccggattctggatcactcgatcaggatcgaaatattgctgtacgccaaggccgtcgcaggtcgggcaggcccccgccgggttgttaaagctaaacagtcgcggctccagttcacgcatactgtagccgcaaattgggcaggcgaagttggcggagaacagcagctcttccgctttcgggtcgtccatatccgccactaccgcggtaccaccggaaagctccagcgcggtttcaaaactctcggcaagacgttgggtaagatcgtcacgcaccttgaagcgatcaaccaccacttcaatggtatgtttcttttgcagttccagttttggcggatcggaaagatcgcagacttcgccatcaatacgagcacggatgtagccctggcttgccaggttctccagcgttttggtgtgttcgcctttgcgctctttaatgattggcgcgagtagcatcagacgcttgccttccggctggctcagcacgttatccaccatctggctgacggtttgcgccgccagcgggacgtcgtggtccggacagcgcggctcgccaacgcgggcgaataacaaacgcaaatagtcgtggatttcggtgattgtccccaccgtagaacgcgggttatgagacgtgcttttctgctcaatactgatggcaggagaaagcccctcaatatgatcgacgtccggcttttccatcagactcagaaactgccgcgcgtaggcggaaagggattcaacgtaacggcgctgcccttcggcatataaggtgtcgaaagcgaggctggatttgccagaaccgctaagcccggtcacgacaatgagcttgtcgcgggggataacgaggttgatgtttttgagattatgggtgcgggcgccccgaacttcgatcttatccattcacctttcccggattaaacgcttttttgcccggtggcatggtgctaccggcgatcacaaacggttaattatgacacaaattgacctgaatgaatatacagtattggaatgcattacccggagtgttgtgtaacaatgtctggccaggtttgtttcccggaaccgaggtcacaacatagtaaaagcgctattggtaatggtacaatcgcgcgtttacacttattcagaacgatttttttcaggagacacgaacatggccagcagaggcgtaaacaaggttattctcgttggtaatctgggtcaggacccggaagtacgctacatgccaaatggtggcgcagttgccaacattacgctggctacttccgaatcctggcgtgataaagcgaccggcgagatgaaagaacagactgaatggcaccgcgttgtgctgttcggcaaactggcagaagtggcgagcgaatatctgcgtaaaggttctcaggtttatatcgaaggtcagctgcgtacccgtaaatggaccgatcaatccggtcaggatcgctacaccacagaagtcgtggtgaacgttggcggcaccatgcagatgctgggtggtcgtcagggtggtggcgctccggcaggtggcaatatcggtggtggtcagccgcagggcggttggggtcagcctcagcagccgcagggtggcaatcagttcagcggcggcgcgcagtctcgcccgcagcagtccgctccggcagcgccgtctaacgagccgccgatggactttgatgatgacattccgttctgatttgtcattaaaacaataggttatattgttttaaggtggatgattaaagcatctgccagccataaaaaagaagcctccgttatggaggcttctacgtatcaggtcaaaatcattggccattgtggcggtgtctgattcatctcttctatcatcacgctctcgatgttgtgccagatagcggtgatgtccgccattgtgatgccaagcaaccccattgcgaaccaacaggcggaaacaacgcccagaccgctgctgatcaccgcaagcccgacataatcagaccgacgaaaacggatgttgagtgtgctggccagaaacatcattacggcactaagaagttgccagcgaagaagaaccacgccagtggtgagggtagccatcaaacaattcctctgaaaagagccgatgccctggacagcgcggcgttgttcacgggaggcgtggtacactctggctatcgcggggcttgcagaacacaaaaatgaaacactctgtttgtttcattaattttgtgaactatatcacaattgattgtttgttagccatattaggccgtgacttttattgctgtacagattatgtggtttttcagtggcattaagggcatatcttcccgccgcctctgcattcctgtaggaaattaattttgaatatcaatgaattattttcatccaggtgacgattagaaaggtatcaatttcaaatcaggcaaaagtgctatttataccgtaagatttatctaaagacgtcggtacccagggttttcaccttgcaatggccgggtataaacaggcaggaaattgatagcaatgagtcatcgtgcacgacaccaattactggcgttgccgggcattatctttttagttctctttcccatcattcttagcctatggattgccttcctttgggcaaaaagtgaagtgaataatcagctccgaacctttgctcaactggcactggataaatccgagctggtcattcgccaggcagatttagtgagcgatgcagctgaacgctatcaggggcaagtttgcactccagcccatcaaaagcgaatgttgaatattattcgtggctatctttatattaatgaattgatctatgcccgtgataaccattttttatgcagtagcctgatagcgcctgtaaacggctatacgattgcaccggccgattataagcgtgaacctaacgtttctatctattattaccgcgatacgccttttttctctggctataaaatgacctatatgcagcggggaaattatgtggcggttatcaaccctctcttctggagtgaagtgatgtctgatgacccgacattgcaatggggtgtgtatgatacggtgacgaaaacctttttcagcttaagcaaagaggccagcgcagcaacgttttctccgctgattcatttgaaggatttaaccgtacaaagaaatggctatttatatgcgacagtttatagcacaaaacgcccaattgcagccattgttgcgactagttatcaacgtcttataacccatttttataatcatcttatttttgcgttgcccgccggtattttggggagtcttgttctgctattactctggctacgtattcgacaaaactatttatctcccaaacgtaaattgcaacgcgccctcgaaaaacatcaactttgtctttattaccagccaataatcgatatcaaaacagaaaaatgtatcggcgctgaagcgttgttacgttggcctggtgagcaggggcaaataatgaatccggcagagtttattccgctggcagaaaaggaggggatgatagaacagataactgattatgttattgataatgtcttccgcgatctgggcgattacctggcaacacatgcagatcgctatgtttctattaacctgagcgcctccgattttcatacgagtcggttgatagcgcgaatcaatcagaaaacagagcaatacgcggtgcgtccgcagcaaattaaatttgaagtgactgagcatgcatttcttgatgttgacaaaatgacgccgattattctggctttccgccaggcaggttacgaagtggcaattgatgattttggtattggctactctaacttgcataaccttaaaagtttgaatgtcgatattttgaaaatcgacaaaagctttgttgaaacgctgaccacccacaaaaccagtcatttgattgcggaacacatcatcgagctggcgcacagcctggggttaaaaacgatcgctgaaggcgtcgaaactgaggagcaggttaactggctgcgcaaacgcggcgtgcgctattgccagggatggttctttgcgaaggcgatgccgccgcaggtgtttatgcaatggatggagcaattacccgcgcgggagttaacgcgcgggcaataaaattacaggcggtggcgataatcgctgggagtgcgatcaaactgccgacggaaaacgcgggagaaggtctgctggctgacataacccaggtccattgcgatatcaaaaatcggacgctcggtggtgcgcaactcaacggcggccagtaacaggcggcgttggcgaatgtaatcgccaagcgtctgatgcgtcaccgtgcggaacattcgttgcaagtaccacttactatagccacttttttttgcgactacatcaatgttaagcggctggtcaatatgctcgtcaatccatgcgataagatcctgaataattttctgatgggacataaatctgcctcttttcagtgttcagttcgttaattcatctgttggggagtataattcctcaagttaacttgaggtaaagcgatttatggaaaagaaattaccccgcattaaagcgctgctaacccccggcgaagtggcgaaacgcagcggtgtggcggtaagcgcgctgcatttctatgaaagtaaagggttgattaccagtatccgtaacagcggcaatcagcggcgatataaacgtgatgtgttgcgatatgttgcaattatcaaaattgctcagcgtattggcattccgctggcgaccattggtgaagcgtttggcgtgttgcccgaagggcatacgttaagtgcgaaagagtggaaacagcttagctcccaatggcgagaagagttggatcggcgcattcataccttagtggcgctgcgtgacgaactggacggatgtattggttgtggctgccttagccgcagtgattgcccgttgcgtaacccgggcgaccgcttaggagaagaaggtaccggcgcacgcttgctggaagatgaacaaaactaaagcgccacaagggcgctttagtttgttttccggtctttgtctttctctctatcccgctggtacacaggagggtttcccccgacgtcaacacacctcattcgagcacgtggtggaggttccggttggtgttgatgctttaattgtatgtcaccgacgtttcttcgccagtgtaaaagtatactttttaaccgcaatatttttgtcatctcagacgattttttatcgcaatcctgaacggtatacggctcgataacgctgcaatcttgcgcaccgacgataacgtttgcgcatcaattgcctggtttttcatcgtcaagacaataaaagagaaaaaagcagcaaacttcggttgaaaaagccgctatgatcgccggataatcgtttgctttttttaccacccgttttgtatgcgcggagctaaacgtttgcttttttgcgacgcagcaaattgtcgcaaacctggagcaggaagataacgtttcgctggcaggggattgtccgccacgcatcttgacgaaaattaaactctcaggggatgttttcttatgtctacgccaagtgcgcgtaccggcggtagtctcgacgcctggtttaaaattagtcaacgtggaagcactgtccgtcaggaagtggttgccgggttaacaacgtttctggcgatggtctacagcgtcatcgtcgttccaggtatgttgggtaaagcaggcttcccgcctgcggcagttttcgttgcaacctgtctggttgccggactcggttctatcgtgatgggtctgtgggctaatctgccgttggcgattggttgcgccatctccctgacagcgtttaccgcattcagcctggtgctggggcaacatattagcgtacctgtcgcgctgggtgccgtgttcctgatgggtgtgctgtttacggtaatttctgccacgggtatccgtagctggattttgcgcaacttgcctcacggtgtggcgcacggcacggggattggtatcggtctgttcctgctgctcattgccgctaacggtgtcggtctggtgattaaaaacccgcttgatggtctgcccgttgcgctgggtgatttcgcgaccttcccggtgattatgagtctggtaggtctggcggtgatcatcggcctggaaaaactgaaagtccctggtggcattctgctgaccattatcggtatcagtattgtcggtttgatcttcgatcctaacgtccatttctccggcgttttcgccatgcctagtttgagcgatgaaaacggcaatagtctgattggcagcctggacattatgggcgcgctgaatcctgtagtcctgccaagcgttctggcgctggtgatgacggcagtatttgatgccaccggaactatccgtgccgtcgccggccaggcgaacctgctggataaagatgggcagatcatcgacggtgggaaagcactgaccactgactccatgagcagcgttttctctggcctggtgggtgcggctccggcagcggtatacatcgagtctgcggcgggtacggcggcgggcggtaaaaccggtttgacggctatcaccgttggcgtgctgttcctcctgattctgttcctctctccgctctcttacctcgttccggggtatgcaacggctccggcgctgatgtacgttggcctgctgatgctgagcaacgtggcgaaaatcgactttgctgattttgttgatgcgatggcgggtctggttacggctgtattcatcgtgctgacctgtaacatcgtaacaggcatcatgatcggcttcgcgactctggtgattggtcgtctggtttccggcgaatggcgcaagttgaacatcggtacggtcgttatcgccgtggcgctggtgaccttctatgcgggtggctgggctatctaatctttcatcggattctgaaaacgggtggcaatggctgcccgtttttattttctccgcacattgtgtgagcttttgcgatattctgaaaaaaatgagaattcaggcataacgtctttctcagatcataaaaaacatcgcaaacagggaacgcatggaaatcttcttcaccatactgataatgaccctcgtggtcagcctgtccggggtggtcactcgtgtcatgccctttcagatcccgcttccgcttatgcaaatcgccatcggtgcgctactggcgtggccgacgtttggtttgcatgtggagtttgatcctgaactctttttagtcttgtttatcccgccgttgctgttcgctgatggctggaaaacgccgacccgtgaatttctcgaacatggtcgagagattttcggcctcgcgctggcgctggtggtggtcaccgtggtcggcattggcttccttatttactgggtggtgccgggcattccgctgatccctgcctttgcgctggcggcggtgctttctccgaccgatgctgtggcgctctccgggattgttggcgaagggcgcatcccgaaaaaaatcatgggcattttgcagggcgaagcgttgatgaatgacgcctccggtctggtgagcttgaagtttgccgtagcagtggcgatggggacgatgatcttcaccgtcggcggtgcgacggtcgaatttatgaaagtagccattggcggtattctcgccggttttgtggtgagctggctgtacggtcgcagcctgcgattcctcagccgctggggcggtgatgaacccgcgacgcagatcgtcctgctgttcctgctgccattcgcttcttatctgattgccgaacatattggcgtttccggcatcctcgctgcggttgccgccgggatgaccatcacccgctccggtgtgatgcgccgtgcgccgctggcaatgcgcctgcgtgcaaacagcacctgggcgatgctggaatttgtctttaacggcatggtgttcctgctgttaggtctgcagctgccgggtattctggagacgagcctgatggcagcagaaatcgaccctaacgtcgaaatctggatgctgtttaccaatattattctgatatatgcggcgctgatgctggtccgtttcggctggctgtggacgatgaaaaagttcagcaaccgcttcctgaagaagaagccgatggagtttggtagctggaccacacgagaaatcctgatcgcgtctttcgccggggtgcgtggggcgatcactctggccggtgtgctctctatcccgctgctcttgccggatggtaacgtcttcccggcgcgctatgagctggtgttcctggcggctggcgtcattctcttcagcctgtttgtcggcgtggtgatgttgcctattctgctacaacacattgaagtcgcggatcatagccaacaattgaaagaggaacgtattgcgcgagcggcaacggcagaagtggcgattgtggcgatccagaaaatggaggagcgtctggcggcggataccgaagagaatatcgataaccagctgcttacggaggtcagttctcgcgtcattggtaacctgcgtcgtcgcgccgatggacgtaacgacgttgaaagttccgtgcaggaagagaaccttgagcgtcgcttccgtctggcggcattgcgttctgaacgtgctgaactttaccacctgcgcgccacacgggagatcagcaacgaaacgctgcaaaaattactgcacgatctcgatttgcttgaagcgttgctaattgaggaaaatcagtaagccgaaagcgacgtaaccaggcccgaggtaatctgaaaaaggtgcaatcttttgcacctttaacaggttagctcgggctaacattcatgattctaaaacaaataaattatctctcttttaaagtcaattcattggctgttcttcgacttaacctcaatctgcatcttgcataatatctgcagtaatcttcatagcgactgcatgaagattatcctcagtttgactcatgccagtatgagtggcacaatcttcttcaaagaatttctgtagtgttaccaggatatcactattaatggagatattttcctcaccacggagaatggtaatacccattccctggacgctagcctcatcgaaattaacacgatagagacggatattaaacatccaggcttttgttaaaacagaacagttgaaatggcaattgcttaaattggcattattaaaattaacattagccatattagagtcggtacatataaccatttcgaggaacgtatttgttaaccgcgtaaaaaagagtttgctatcaattaagtttatattctggagggttgctttattcaggttgacacgagacagatcagcatgttcaaagttaattaaatcaagtttagagaagctaaggtcggctctaaataaattaatatatggcgctattactttataaagatttacctcagccatgtatgccatataaaaattactataatcaaggaaggtatttttaatattggctctattcattgttgcattgtagaattgaacatgcatagcggaacaactatttagagttccgtcagtcatttttatctgagcgaaattactgtcatcgagaatacaattatcaaaaagtattttttccattatggcgaaattaaaattcgttttatacatattacagtcctgaaaaatagcgttttgtagtctgcaacctgcaaaattgctattggataaatcttcatctttaatcacgatacctttcaggctaaggtgactaaaatcgtaaccaccatttactgtctgtgggatttcgatagtattattatggacggtgacattatttataaaatataccaccttaatactcacttccttatctttattaaggtaaactcttctcgtaattctatcgtcacatttattatttgcatgactagctatatctataaaatatttatgtattttcctgtccgtttctttcgtgatttttccacttggtaaactatcataaattcttttcattttctgaatcaagcctatcactttttcatgatcatccattttgaaaagagagagggctttattgtcaattaacgtgtttttatgatgtttgctgtaattatcactttttgttttctttgtatgacttggacttgtgacagagtggttatcgttaatcaggcaaagagggaaaaacatattatttaaaccattatagcgcataaaatatccttataattaacaagaaagaaaaggcatattctctgcattatcattttctacgactgtcaaaaatcgctcattttttaatgagtttatttgtttaatattatgggaaaaggtgatgcatttgggagaggaagagtattccccggtcagacgaccggggaaggggagagattaatgcgcgcggccttgctcaacgccaaagccggtctgggagcggataaactgcgcgcggaacagttcacgctcacgcgcgccttccgcactgttatcggttgcgctgaagaaccagatgccgaggaatgccacggtgatagagaacagcgccgggtattcatacgggaagatggctttttcgtgaccaaggatctgtacccaaatcgtcgggccgaggatcatcagtactactgcggtaatcagccccagccagccacccatcatcgcgccacgcgtggtcagtttgctccagtacatagaaagcagaatgatcgggaagttacagctcgccgcgatggcaaacgccagccccaccataaaggcgatgttctgattctcaaacagcacgccgaggataatcgcaatcacgccgaggatcagtacggtgattttacttacccgcagctcttcacgttcggtcgcgccttttttgaagacgttagcgtacaagtcatggctaaccgcggatgcgcccgccagcgtcagacccgcaaccaccgcgaggatagtggcgaaagcaaccgcactaataaaaccgaggaacaggttgccgcccactgcattcgccaggtgaacggccgccatgttgttaccaccaatcagatggcccgccgcgtctttatattccggattcgcaccaaccagcatgatcgcgccgaagccgataataaaggtcagaatatagaagtagcccataaacccggtggcgtagaacacgctcttacgtgcttcgcgggcatcgctgactgtaaagaagcgcatcagaatgtgcggcaagcccgccgtaccaaacatcagtcccagacccagagagagcgcggagatcggatctttcaccagcccgcccggcttcatgatgtcgacacctttcgggtgtaccgccatcgcttcactgaacagattgttgaagctaaagccgacgtgtttcatcaccataaaggccataaagctggcaccgaacagcaacagcacggctttgataatttgcacccaggtggtcgccagcatgccgccgaacaggacgtacatcatcatcagcacgccgaccagcaccaccgcaatgtgatagttaaggccaaacagcagctcgatcagtttacctgcgcccaccatctgggcgataaggtaaagcgccaccaccaccagagaaccacaggcgctaagaatacgaatcggcccttgtttcagacggtaagaggccacatcggcaaaggtgtagcgccccaggttacgcagacgttcggcaatcaggaacaaaatgatcggccagcccaccaggaagcccaggctgtaaattaagccgtcatagccggaggtaaacaccagcgcggagatccccaagaaactggcggcggacatatagtccccggcaatcgccagcccgttctggaagccagtgatattgccgcctgcggtgtagtagtcgctacgagaacgtacgcgtttacttgcccagtaggtaatgccgagcgtaaacacgacgaaaatcaggaacataataatcgcctgccagttcgttggctggcgctctacggccccgctaatagcatccgcggcgttagctgcgaaagggagtgtggcggcaagcgccgtcagaactcttttcatgatgcttgtacctcatgcagttatttcaacttgcttgtacctcatgcaggacttcattattaagacggtcgaattcgccgttcgcccgccagatgtagataccggtgagaacaaaggagatcacaatcactccaacaccaattggaataccgcgtgtgacgctggtgttcggattcagcggcgtgcccagccagccgggcgcgaaggcgatcagtaaaataaagccgatataaactgccagcataataatgctcaggatggtggcaaaccgttgccgtttttcgactaactccctgaaatgcgcattgtcttctatccgctgataaatagtgccattcatcacagattctccagaggtaatgtagggattgttttaattcccgctcccttatgggagaaggttaacgctcgggtaacccttgccgaatgtaggccggataaggcgtttacgccgcatccggcaatcaatgcctgatgcgacgctgtcgcgtcttatcaggcctacaaaccgttaccgactcgcatcgggcaattgtgggttagcttggcatcgcgatagcctgcttctcttcaagcagcttctcgactacgccaggatcggcaagcgtgctggtatcgcccaggttgctggtatcgcccgccgcaattttgcgcagaatacggcgcataattttgccggagcgggttttaggcagggagtcggtccagtgcagcacgtctggcgtcgccagcgggccaatctctttacgcacccagttgcggacttctgcgtacagttctggactcggttcctccccgtgattaagcgtgacgtaggcgtagatcgcctgacctttaatattgtgcggaatacctactacggcggcttcggcaatcttcggatgcgccaccagcgcgctctcaatctctgccgtccccagacggtgaccggagacgttcagcacgtcgtccacacgcccggttatccagtaatagccatcttcatcgcgacgcgcgccgtcgccgctgaaatacatatttttgaaggtggagaagtaggtctgttcaaaacgttcgtgatcgccaaacagcgtacgcgcctgacccggccaggagtcggtgattaccaggctaccttcggtggccccctccagcgggttaccttcgttatcgaccagcgccggttgcacgccgaagaacggacgtgttgcgctaccggctttcagctcggtagcgccaggcagcggggtgatcatgaaaccgccggtttcggtctgccaccaggtatcgaccaccggacatttctcgttgccgatttttttccagtaccactcccacgcttccgggttaattggctcgcccacggaaccgagaatgcgcaggctgctacggtcggtgccttcgatcgctttatcgccttccgccatcagcgcgcggatcgccgtgggtgcggtatagagaatattgacctgatgcttgtccaccacctgcgccatacgggcaggcgtcggccagttgggtacgccttcaaacatcagcgtggtcgcaccgcaggccagcgggccgtacagcaagtaactgtgtccggtcacccagcccacatcggcggtgcaccagtagatatcacccggatgataatcaaagacatatttaaaggtcagcgccgcgtacaccagataaccgccggtagtatgcagcacaccttttggcttaccggtagaaccggaggtgtagagaataaacagcggatcttcggcgttcatctcttccgcctggtgctgatcgctcgcttgctcaaccaggtcgtgccaccacaggtcgcgcccttcctgccagtcaattttcccgccagtacgcttcagtaccaccacatgctctacgctggtgacgttcgggtttttcagcgcgtcatcaacgtttttcttcagcggaatactgcgcccggcacgcacaccttcgtcggaagtgatcaccagtcgactgttggaatcaataatgcgcccggcaacggcttccgggctgaagccgccgaaaatcacgctatgcaccgcgccaatgcgggcgcaggccagcatcgcaaccgcggcttccggcaccatcggcatataaatcgccaccacatcaccttttttaatgcccagctcgagcagggtattggcgaagcggcagacgtcgcggtgcagctctttatagctgatatgtttgctctggctggcgtcgtcgccttcccagatgatggcggtacgatcgccgttttcttgcagatggcggtcaaggcagtttgccgccagattcagcgtgccgtcctcgtaccatttaatggacacattaccgggggcaaaggaggtgtttttcaccttctggtaaggtttgatccagtcaagaatttttccctgttcgccccagaaggtatcaggtacgttaatagattgttgatacatcgcctcgtactgctgagggtttatcaggcaacggtctgcgatgttggcaggaatggtgtgtttgtgaatttggctcatgcttttgttctccttgtaggatgttaataatatgtggcataagcgttaaatgtaggggtattggcagttttgtttagtatttgggcgacagatcacgcaaaagtagaattgtgcaaataaacggcagggtaatttttgaaggtcagcaacaaaagttgattaattctttgaggaacatgcagttatgcatgctgttgaaaaagaggaagatactgactaactctaaagtggtattttacatgcacttacaattgattaaagacaacattcacagtgtggttatttgttacacataggggcgagcaatgtcatgacagtgtaggtgcggttactgtcgtgaaaaacaataaaaaccgccattgcaacaatggcgcaattcggatgaagcccctatgacaaggataaaaataaacgcacgccgtatcttcagcttattgattccttttttctttttcacttctgttcacgctgaacaaacggctgctcccgcaaaacctgtaactgtggaagcgaagaatgaaacctttgccccgcagcatcccgatcaatatctctcctggaaagccaccagcgaacagagtgagcgtgttgacgccctggcggaagatccacggctggtgatcctgtgggcggggtatcccttcagccgcgattacaacaagccgcgtggacatgcttttgctgtgaccgatgtgcgtgaaaccctgcgtaccggtgcgccgaaaaacgctgaagatggtccgctaccgatggcatgctggagttgtaaaagcccggatgtggcgcgtctgatccagaaagacggcgaagatggctacttccacggtaaatgggcgcgcggcggtccggaaatcgtcaacaacttaggttgtgccgattgccataacaccgcctctccagagttcgccaaaggcaaaccggagttaaccctttcccgtccgtatgcggctcgcgcgatggaagccattggtaaaccttttgagaaagccggacgtttcgaccagcaaagcatggtttgcggtcagtgccatgtggagtattacttcgacggcaaaaacaaagcggttaaattcccgtgggatgacggcatgaaagtcgaaaatatggagcagtattacgacaaaattgccttctctgactggactaactccctgagcaaaacgccaatgctgaaagcgcagcacccggaatatgaaacctggacagcgggcattcacggtaaaaacaacgtgacctgtatcgactgccatatgccaaaagtgcagaacgccgaaggcaaactctacaccgaccataaaattggtaatccgtttgataacttcgcccagacttgtgcgaactgccatacccaggacaaagctgccttgcaaaaagtggtcgcggaacgtaagcagagcattaacgacctgaaaatcaaggttgaagatcaactggttcacgctcacttcgaagcgaaagcagcgctggatgcaggcgcgacggaagctgaaatgaagccaattcaggacgatatccgtcatgcccagtggcgctgggatctggcgatcgcttcccacggcattcatatgcacgcaccggaagaaggtttacggatgctcggtacggcgatggataaagcggcggatgcacgcaccaaactggcgcgcctgctggcgaccaaaggcatcacccatgaaatccagatcccggatatcagtaccaaagagaaagcccagcaggccattggcctgaacatggaacaaatcaaggccgagaagcaggacttcatcaaaacggtgatcccgcagtgggaagaacaggcacgtaaaaacggtctgttaagccaataaccccgttccgcctcgcaaggggcggaaaacacaatggagtgaatatgagcgtattacgtagcttattaactgccggggtgctggcgagcggcctgttgtggagcctgaacggaattaccgctacccctgcggcgcaggcatctgatgatcgctacgaagttacccagcagcgtaacccggatgccgcctgtctggactgtcataaaccagataccgaaggtatgcatggaaaacatgcttccgttatcaacccgaataacaaactgccggtcacctgcaccaactgtcacggccagccaagtccgcaacaccgcgaaggggtgaaagatgtgatgcgctttaacgagccgatgtacaaggttggagagcagaacagcgtctgtatgtcctgtcatctgccggaacagttgcaaaaagcgttctggccgcacgatgtccacgtaaccaaagtggcgtgcgccagctgccattccctgcatccacagcaagatacgatgcagacgttaagtgacaaaggacggattaagatttgcgtcgattgccacagcgatcagcgcaccaatccgaactttaacccggcgtctgttccgttgcttaaggagcagccatgacctggtctcgtcgccagtttctcaccggcgtcggcgtgctggcagccgtcagcggcaccgcagggcgcgtggtggcgaaaacgttgaatatcaatggggtgcgttacggcatggtgcatgacgagagcttatgcatcggctgtaccgcctgtatggatgcttgtcgggaagtgaacaaggtgccggaaggcgtcagccgcctgacgattattcgtagcgagccgcagggcgaatttcctgatgtgaaatatcgcttcttccgtaagtcttgccagcactgcgatcatgcgccgtgcgttgacgtctgcccgaccggtgcgtcttttcgcgatgctgccagtgggattgtcgatgttaatccggatctctgcgtcggttgtcagtactgcatcgccgcctgtccgtaccgcgtgcgctttatccatccggtcacgaagacggcggacaaatgcgatttctgccgtaagaccaatttgcaggccggtaagttgcccgcgtgcgttgaagcttgcccgaccaaggcgctgacgtttggcaatctggacgatcccaacagtgagattagccaactgctgcgccagaagcccacttaccgctacaagctggcgctgggaaccaaaccgaagctgtaccgcgtaccgtttaaatacggggaggtgagccaatgacgcagacttccgcatttcattttgaaagcctggtgtgggactggccgattgccatctacctgtttttgattggtatttctgctggtctggtgacgctggccgtgctgttacgtcgcttctacccgcaggcgggcggtgcagacagtacgttgctgcgcaccacgctgattgtcgggccgggcgcggtgatcctcggtctgttgatcctcgtcttccacctgacaagaccgtggaccttctggaagctgatgttccactacagttttaccagcgtgatgagcatgggggtgatgctgtttcagctctacatggtggtgctggtgctgtggctggcgaaaatctttgaacatgatttgcttgccctgcaacaacgctggttgccgaagctggggatcgtgcaaaaggttctgagcctgctgacgcccgttcatcgcggactggaaacattgatgctggtgctggcggtgttgttgggggcttataccggctttctgctgagcgcgctgaaaagctatccgttcctcaataacccgatcctgccggtgctgttcctcttctccggcatcagctccggtgcggcggtggcgctgatcgccatggcgatacgccaacgcagtaacccgcattccacggaagcgcagtttgtacaccgtatggaaatccctgtggtatggggtgaaatcttcctgctggtggcgttttttgtcggtctggcgctgggcgatgacggtaaagttcgtgcgctggtggcggcattaggtggcggtttctggacgtggtggttctggcttggtgtcgccgggctggggctgattgtgccaatgctgctcaaaccgtgggtcaatcgcagttccggcattcctgccgtgctggcggcgtgtggggccagtctggtcggcgtgttgatgctgcgctttttcattctctacgccggacagttgacggtggcgtaagccagaaaagaggtggtttctggacgtattccttcctgaagtcggttttctggcgttgttgttaagtctcggggtcaacgtgttgaccccgttgacggccttcgcgggagtgcggttgcgctggcctgccatgatgcgactcacttgcatcggcattctggcgcagttcgcgctcctgctgctcgcctttggcgtactgacgtattgttttctcatcagcgatttcagcgtcatttatgtcgcgcaacatagctatagcctgctgagctgggaactcaagctggcagcggtgtggggcggccatgaaggtagcctgctgctttgggtgctgctgctttccgcctggagcgcgctgtttgcctggcattatcggcagcaaaccgatccgctatttccgctgacgttagccgttttatctctcatgctcgccgcactgctactgtttgtggtgctgtggtccgatcccttcgtgcggatatttccaccagcaatcgaaggccgcgatctcaatccgatgctgcaacatcccggtcttatctttcatccaccgctgctttaccttggctatggcggtttgatggtagcggcgagcgtggcgctggcgagtctactgcgcggcgagtttgatggtgcctgcgcccgaatttgctggcgctgggcgttacctggctggagtgcattaacggcggggatcatcctcggttcctggtgggcctactgcgaactcggctggggcggctggtggttctgggatccggtggaaaacgcctctttattaccctggctttctgccactgcgctgctgcacagtttgtccctgacacgccagcgggggattttttgccactggagcctgttgctggcgatagttactctgatgctgagcctgctgggcaccttaattgtccgttctggcattctggttagcgttcatgcgttcgcgctggataacgtccgcgccgtgccgttgttcagcctgtttgcactgattagccttgcgtctctggctctgtatggctggcgagcgcgggacggtggcccggcggtgcattttagcgggttaagccgggaaatgttaatcctcgctacgctgttgctgttttgcgcagtgctactgatcgtgctggtgggaacgctttatccgatgatttacggcctgctgggctggggacgcctctccgttggcgcgccgtattttaaccgcgcgacgttaccgtttggtctgttgatgctggtggtgattgtgctggcgacgtttgtctctggcaaacgcgtgcagcttccggcgctggtagctcatgcgggcgtgctgttatttgccgctggggtcgtggtctccagcgtcagccgtcaggagatcagcctgaatttacagccgggtcagcaggtgacgctggcaggatacaccttccgttttgagtgcctcgatctacaagccaaaggcaattacaccagcgaaaaagcgatagtggcactgtttgaccatcagcaacgcattggtgaactgacgccggagcggcgtttttatgaagcacgccgtcaacaaatgatggaaccgagtattcgctggaacggcatccatgactggtatgcggtcatgggggagaaaactgggccggatcgttacgcttttcgtttgtatgtacaaagcggtgtgcgctggatctgggggggaggattgttgatgattgcgggcgcattgttaagcggatggcgggggaagaagcgcgatgaataaagggcttctcacgctactgctgttatttacctgttttgcgcacgctcaggtcgtagacacctggcaattcgccaatccgcaacaacagcaacaggcgttaaatattgccagccagttacgttgtccgcagtgccagaatcaaaacttactggaatccaacgcgccggtggctgtcagtatgcgccatcaggtttacagcatggtggcggaggggaagaacgaagtcgaaatcattggctggatgaccgaacgctacggagattttgttcgctataacccaccgttaacgggtcagacgctggtgttatgggcgctgccagtggtgttgttactgctgatggcactgatcctctggcgagtgagggcgaagcgatgaaacagcccaaaataccggtgaaaatgctgacaacactcacgatattgatggtatttctctgtgtcggcagttatctgttaagcccaaaatggcaggcggtacgtgcggagtatcagcgtcagcgcgatccgctacatcagtttgccagccagcaaaccccggaagcgcagcttcaggcattgcaggataaaatccgcgctaatccacaaaacagcgaacagtgggcgttactgggcgagtactatctgtggcaaaacgattacagcaatagcttgctggcgtaccgtcaggcgttgcaactacgtggtgagaacgctgaactgtatgcggcgctggcgacggtgctttattaccaggccagccagcatatgaccgcccagactcgcgcaatgatcgacaaagccctcgcgctggacagtaatgaaatcaccgccctgatgctgctggcttccgatgcgtttatgcaggcgaactacgcgcaagccatcgaactatggcaaaaagtgatggatctcaacagtccgcgagttaaccgaacacagctggttgagagcattaatatggcgaaattgttgcagcggagattggattaatcatctggtgatgaagattatgtcattgagctgcataaaaaataatcgaatgaacatatgccaaaaataatcactaatcagtattattgcagattaaacaaataaaaatctttccataacaaatggttattcattaatcctgccataaactcgcgttattatgcattaatgcagcgaaaagctctgttgttaaagggttgcgcaacataccgcgcaaatgatactgatcataagcgttaaaaaaatctacaaaccaacgcaacacaattcatgccctggcagtatgtcacgttctcgcgtttctgaacggggaacggcgctccattgaggaagtcattcatatgaaaaatataaaattcagcctggcctggcagattctgtttgctatggtgctgggcattctcctgggaagctacctgcactaccatagcgacagccgcgactggctggtcgtcaatttgctctctccggcgggtgatatcttcatccatctgattaaaatgattgttgtgccgattgtgatctccacgctggtggtgggtatcgcgggtgttggtgatgccaaacagctcgggcgtattggcgcgaaaaccattatctacttcgaggtgatcaccaccgtcgccatcattttggggatcactctggcgaacgtcttccagcccggtgccggggtggatatgagccagttggcgaccgtcgatatcagcaaatatcagagcactacggaagcggtacaaagcagttcccacggcattatgggcacgattttgagcctggtgccgacgaacattgtggcgagcatggcgaaaggcgaaatgctgccgatcatctttttcagcgtgctgtttggtctggggctttcttccctgcccgcgacgcatcgtgaaccgctggtgaccgtgttccgctccatctctgaaaccatgtttaaagtgactcacatggtgatgcgttatgcaccggtgggtgtgtttgcgctgattgcggtgacggtggctaactttggtttcagctctctgtggccactggcgaaactggtgctgctggtgcatttcgccattctgttcttcgcgctggtagtgctgggaattgtggcgcgcctgtgcgggttaagcgtctggatcctgattcgtattctgaaagatgagctgattctggcgtactccactgccagctctgaaagcgtgctgccgcgaattattgagaagatggaagcctacggagcaccggtgagcatcaccagtttcgtggtgccgaccggttactcttttaaccttgatggtagcacgctgtatcaaagtattgccgctatcttcatcgcgcagttgtatggcattgacctgtccatctggcaggaaatcattctggtgctgacgctgatggtgaccagcaaagggattgctggcgtgcctggcgtgagctttgtggtgttgctggcaacgctgggtagcgtaggtattccgctggaaggtctggcgtttattgctggtgttgaccgtatcctcgacatggcgcgtactgcgctgaacgtggtgggtaatgcgctggcggtgctggtgattgccaagtgggaacacaaatttgaccgtaagaaagcgctggcttatgagcgtgaagtgctgggcaaatttgataaaactgcggatcaataattgaagattgccggggatatccacccggcaatgtgtgaatgcctgatgcgacgcttgccgcgtcttatcaggcctacgccagacagcgcaatagcctgatttagcgtgattttgtaggtcggataaggcgtttatgccgcatccgacatcaacgcctgatgcgacgcttaacgcgtcttatcaggcctacgccagacagcgcaatagcctgatttagcgtgattttgtaggtcggataaggcgtttacgccgcatccgacatcaacgcctgatgcgacgcttgccgcgtcttatcaggcctacgccagacagcgcaatagcctgatttagcgtgattttgtaggtcggataaggcgtttatgccgcatccgacatcaacgcctgatgcgacgcttaacgcgtcttatcaggcctacgccagacagcgcaatagcctgatttagcgtgattttgtaggtcggataaggcgtttacgccgcatccgacatcaatgcctgatgcgacgcttgccgcgtcttatcaggcctatcttaaccgttggttaatttttcaaactcttcacacccggtatcaaacccttccatacagctcaggttcaaccagtgcagcgccttttgcttgttcttctcgataaaaccttcttcaccgtttaagaacatcattcccgcccagtactcggaataaccggttcgggaaattgcagagctgcgtttgaaataccaggttgccttgtcatcgtcggccttaatgcccacgccgttggcgtaaatcaaaccaagcagcatttgggcatcgacggcagagtcgttctccagatcttcgctggcgttttctaacaggctaattgcctttggataatccggtttacccgcttgagtatttaccagaatatgcgccagcgttacttcaccttctttactgcccgcttgcgccgctttctctgcaagaacttttgcttgtggatagtccagactgaccggattggtgattttgatctgcgccagcagcgcgcaggcatcagcatcaccgctgtcggcggctttctgtgcccaatattcggctttgctcaaatcgccggagctaaaccagctgtcggcaagaaaatattgtgcgcgtcggtccccggcctctgctgcctttaaatactggctgccaggctcggagtcgttggcgtgggcaaagaatgtcaaaaacaacatcaatgcgataatttttttcattttgataatacgattgggtagggagtaaccagtataaagagttcgaatggataaaaaaacagcctccgaaaggaggctgtagaaaggacggtattacgccagtgccgcttcgcgcaggcgagttttcaacttgttgtactcgtcaatcacgtactgctcggcggcgcgctgatcggcgatcggctcgacgcgaacggcgcagtatttgtactccggcgttttcgtaatcgggcttaagttttcggtaaccagctcgttacaggcaccaatccaccactggtaggtcatgtaaatcgcccctttgttcggacgatcgctgacctgcgcacgggtgataattttgcctttacggctgtgcacccaaaccaatgcctcatcttcaatacccagacgtttggcgtcttcggtattgatttgtgcgtagccaggttcatcagccagcgccgccagtgccgcacagttaccggtcatgctacggcaagagtagtgaccaacttcacgcaccgtactcagtaccatcgggtactcgtcggtgagtttgtcgattggcgctacccagtcgcaggtgaagaactgcgccagaccgttcggggtatcaaacttctctttaaacagataagaagtcccctgatcggcatcactagtatcgcggcaaggccactgaatgaagcccagttcgcccattttctcgtaagtcgcaccgtagaaatccgggcacagatgacgcaactcatcccagatctcctgggtgttgttgtagtgcatcggataacccatacgggtggcgatttcactgatgatttgccagtccgttttcagatcccatttcggttcaaccgccttgaagaaacgctggaagccacggtcagccgcagtaaacacgccttcatgctcgccccagctcgtactcggtaaaataacatccgccgcgctcgcggttttggtcataaagatgtcctgaacgataaccagttccagatcttcaaaggctttacgtactgcgctcagctccgcgtcagtttgtagcggatcttcgcccataatgtacgcggcacgcacttcgccatgcgctgcgcggtgcggcagctcgctgatgcgatagccggtatgcgctggcaggctttccacgccccaggctttggcgaatttctcgcggttagccggatctttcacgtactggtatcccggatacgtatccggcagcgcgcccatatcgcaggcaccctgaacgttgttctgaccacgaaccgggttaacacccgcatgcggcttaccgaggttaccggtcagcatcgcgaggctggtcagagaacgcacggtttccacgccctggtagaactgggttacacccatgccccacaggatggcggcgcttttcgcctgggcatacatccgtgccgcctgacgaatctcactggcgctgacgccggtgatatcttcaacgctctccggcgtgtagccttcaacgattttacgatactcttcaaagccttctgtacgactagcgacgaacgctttgtcgtacagattttcttcaataatgacatggcccatcgcattcaacagcgcgatgttgctgccgtttttcagtgcaatgtgcatgtcagcaatgcgcgcggtttcaattttgcgcggatcgcagacgataattttcgccccgttacgtttagcgttaattacgtgattcgccacgattgggtgggaatccgccgggttgtacccgaaaacgaacactaaatcggtattatcaatttcgttaatagcattgctcattgcgccattaccgacgctttggtgcagacctgcaacgcttgggccgtgtcagacacgagcgcagcagtcaacgttattggtaccaataacggcgcgcgcaaatttttgcattacatagttggtttcgttacccgtaccacggctggagccggtcgtctggatggcatccggaccgtacttctctttgatggcgctcaggcgctcggcaacgtaattcagtgcctcatcccaggaaacaggttcgagtttgccgccacgctggcgacggatcatgggggttttcaggcgcggggtcaggatctgggtatcgttaatgaagtcccagccataataacccttcagacacagggtaccctggttggttttcccctgcgctgcctccgcccggacgattttgccgttatcgacgaccaggttgattttgcaaccacttgcgcaataggggcaaaccgtgacgacttttttcatcggtctcgctccagttaatcaaatcacgcatacgcgctctcgactacagtatgcatcttttatgccacattttatgtggggtcattccctgatattacgggcactatttattcaaaactctgacgaaaaacaggctgtcgtcagttttgacgtgacgaaacgaaataccgcgtgacagccatcacgcggcagacattttattttttctcgacgacgggacctgcctgatacccgccgcccaggcttttcatcaactgaatgctttggatcacccggcggctgtccagcatcagtaaactcatctcttcggcaagcactggcaaccgggcttcggtggcctgtaagcggctggttaagccgcgctgataggcggcctcggcagcgcgctgggtaaagcgcgtggcttccacgcgttcagcctgcatttctcgctcgtcgttgagcgtttgcagacgcgtgccgttgacggcaacgtcacgcaccgcgttcagtacactctggttgtaacgttcaatcatcatgttgctggcggcgcgcgtgccttcgagattggcattcaaccgtccaccgtcaaacagcggcaatttcagacccgggatgaagttgaactggcgactggtttttttgaataaggtatgcagatggatggagtccagaccgaaaaacgctttgatatcaaagctcggatagaacaacgcccgcgcggaatccacctgatctaaactcgcctgaacataccagcgcatggcttgcagatccgggcgtctggcgagcaactcataagagagtgtcgccggaatgccggtctggacttgcggtaatgccaccggtctgatctccggcatatcgctggctcccgcgccaatcaatgcacgcagagattctcgcgtttcggtgatttgccctttgacggcaacaatttgtttatcgaccgccagaatctgtgcccgcgcgccgtggaaaggcacttgcgcttccagaccgtgcgccactttactctggtgcgctttcaccgcgtaatcaatcacatcgtgagtttgttctaacagatcgagcatctgatagctggcctgcatactgtaataaagctgcgctacgcccgtggccaggcttagctctactgctgcggtttctgccagcgcggcattatgcgcgccaatggcggcggcaaccgcactgcgatgcacaccccacaaatcaagatccagtccggcaaacaaacctactgtggcttccgtatagtacggcccgtccatacccagtgctggcgcatccatactataagggcttaaaaagccgttcgcgctgacacgttggcggttgagcatccctaacgctgcgacctgtaattgactaccggcatctaacaaatcggcctgggactgcgctttttcttcccgcagtttcgcttcggcgagggtgtgactaccacttagcgtccgttggatcagcgcatccagctgcgggtcattgagttgtttccaccactgcgcctgcggccagccggagctggcaagatgaatatcgtcggccagtttgatttgttccggtttgagctgttgatgaggtgcagaatccttacgtaccagggcacagccggaaatcagcgtcgtgctgccgagaatgctgcacaacagcagacgactaagttgacgattgatcattgcgtggctccttgtgcctgttccgtggcgggcgttaatgccggggctgtccagtctggcaagcgggcgaaaagctggcagacgtgttgctcctgttttaataaggtgggcaggatggcctgagaggcgggtgtctcttcaagcgttatttgaggagaacggctgagtgcggttgccagaccggcagcgtatttctccagggcgtcggcaaactgacctgctctgtccggctgtagtgcgttatccagcgcctgcgcgctgttccaggtggcatcccaggcgtgaagaagatcgcggccctgacgaataaccgtttggctacgttcaatcagtaatgcgcgttcttcgctgtccagttgacgctccagcgccacgcgttggcacatctcttcacaggcattaaacgccgcatgcagaccgatacgaatttgcagataagtgcgcagagccgtgacttcctgctggcgtgggatccgcattactttacttaacatacccagcgtgccagccagtttttgcggcagtgtgcgcgcttcactttcaggccagacaaaggtgtaaatcaccgcggacaccacggtaccaatgatgatacccagggcgcgatcgcgaatttccaccaggtcgtacactgggccaaaaacgttttcgagcgtggcgagcgcgaaggtgaccaccatctgtgtgccgatataagaagagcgttcagagctggtggcaatccatgcgcccaacaggaaaatcggtgccagcacaaacagcaattcgacaatattgtccagccagggcatgaccagtagcgtgaataacagcgccagaatcgcgccgcaaaaggccccgccaaaacgcagcaccatcttctggtagctgctaccgacatttgggttagcgacgatcacgcatgtcagcatacaggtgtgaatgccttcccagtccacgccgctgtaaaaggtgtaacagatcaaacaggcgagcagcgtttttaccgcgtagcgcatatagtctggattggtaaaagcatcggcggccatacttggcggtttggctgcgggcgttggcggcgtattcgggtccatctgacccagttgtaacaacgtctggcagatattctccaggttacattcccgtgccgccatcgcttcactttcactgatccgccagtcgctttgccagcactgaccttcagcaacggcatgctgcagcttgttgatttcactagctaatttttgtcggaattcaataattgcctgagaatcagcaaaagaggtgggatcgtagcgattcagcgtgctgtaaatgtaggttaccgttgccacgcagctttgccaccatgcgttttgagttcgccagttggcatcgtccgcgaggcaaaagacattgagtttttgtagcgccagcgcctctctttcaatccgcgtttcgggtagcggtgcgaggctgtctgtcaggtgactaatggcatcatcaagccgatcattaagcgcctgatgcatttggctaatggcacgactgggaaaccacagcacgccgattaacgtcatcagcaaggttggatagaggccaacaacgatacaccacagcgttaagcgcacgaccacttccggatagtcgagcatggcggggaaggtttgcccgtaaatagcgacaatggcgacggcgaaaaagaccagccccaagcgatgggtgcgcatcaaaaacatgcagcccatcaggatcggtccggcgatgatcaatcggatcaacggttcgccgtaactccatttgtagatcaaaaacaggctgccgatctccagcaccgtggcaaccacaaacaagatcgcgacaaatttggtgtaaaacgcgttgctctgaataccgtaaaacagcactgccaggcttaacgccacaaaagggatctcaaaggtcatgctgatcagaatcaccagcaggcagcctacccagagttgcacggtctgcggcacgcgacctggtcgccgctcgcttaactcttcatgaaagaacgccagcagcctgaccaccggtaatggcagggagttgagcgcgctcattattgcggctcaagattagcgactgcgctagcgccgatgcggaacatttccgggtcaggtttatcgaccatgattttgaccggaaaacgctgggcaacgcggacccagttaatagaacgagacactttcggcaggccgcccagcaccaggccgccgtcatccggtagcacgccgtagccaatgctatccactttaccctcgaaggttttgccgctgtcactcatcaggcgaatcgttgcgggtgtaccactgcgaatatttttcagatcggtttcgcggaagttggcgatcacataccagtgacgagtgtcgattagggtaaaaatagggcgcatggcagaagcaaattgcccgacggaggttttgagggaaatgacccggccatcaaacggcgcgcgaacggtcgccatttccagatgcagtttggtcagggcaatatccgcttcgaccgccgcacgctgggcaactaatgcatccacgccgctgacggcgctggcggcactctgcgcctgtaacaatacggcattaagatccgcttctgcggcgcgctgcgccgttcttgcacggtcaacatcttccgcactgacaaaaccttctttcagtaatggctcggtgcggcgtaatgtatctgtggcctgtttcgcggcggcacgggctttttctaccgtggcattaacgctgtcggcaccaaactgttgcgcgtcaacgctacgctgggtgagcataatttgcttatccagcgccgcgagggaggcttcagctttcgccagattggcttcgtacgggcgcgggtcgatgcggaacagcaaatcgccctgtttgactgcctggttgtcggtgaccgccagttctacaatgcggccgctgacttccggtaccacatcaatggtatctgcactcgcgtaagcgtcattagtacttggcgcactgtctacgcgccagataacgaaaacaagggcaaccagcgccaacgcaaccactaacagagcagggaatttactgcgaggagcttttttcggcgtactttccatgagcgcgtctcaaatagattagaaaaatgccagccagaacagcatggcgtagagagcaaaaagggcggtataaataattccgacaaatgccagattgatatttgcccgctgaataactcgcctcgtgatgagcgtcaaaataaggctggcaatggcgcagaaaaaccagctgggataataagcgccgatcaccgggattgccggagataatgagcatcccgaaaccatgaagacgggaattatccaggctgtttttttgagttgcatcgccatgcgagagagaactgttggcatattaaatacatcctgtctgctgcgaacaatatctgtagtgaatatcaatatccattgaaggcgtcagtatggctattttcttgatgaataaaaatagctttattcagccaccgcattcataacttatatattttatttattaattggctgtatatatttttaaaataaatacttttgggggcttcagcgcccccaaaagcgagtgacattaatttggggttacgatattcacccacaaatcgaaattatccagacaggcgataatttcttccagtttcgcgccattgccaataattttggctttcttcgcttttaccagatccgccattttggcttgtccggtcagcacggcgtgcagatcttcacggctgatgtagaaagaggcgtcggcttgcggttgcagcgttttccggtagttaagcacgctatcgttcagcgtcaggttgaggttatcgccgttgctcatattgaagttcaggctgatatttttacccgcagctttcgcgctatcgaggcgaacggccataaagtcgaacagcatttcgacgctcatcccgcgaatggtgtccggggaaccggtggtgccgtggctgaacttatgcaccccttcgcgcagctctttcgcgccggtcaggtagaaaccgcgccatgtggcggactcggcctgatagcccagctgttcaaagttattcgcttgcagattcttcgcgacctggtcacccgggttggcggcaatcacctgtttcagcagttctgcgctccagcggtaatcaccttgcttgttcgcttcttgcgccaggttgatgacacgggcagaaccgcccagcgcctgcacgtaacgtttacccatctccacctgaccatacggatgcaggttagccgggttaccgtcgtaatagccaagatagaagttatacaccgcgcgggcgttgtggctgacagaaccgtaatagccgcggctggcccagttattggcaagtgcaggcggcagcttaatcatgtcgccgatttcattcatggtgtagccctggttcgccaggtgcagggtctggtcgtgaatgtacttgatggtatcgcggtatttaccaatataatcattgatatgcttattgccccagaccggccaggtgtgcggcataaacagcacttccgcgtcgttaccccacatatccagcgtttcgttcagatactcggtccacttgctggtgtcgcgggttttcgcgccgcgcagagtgtagaagttgtgcagggtatgcgtggcgttctcggcggtacacagggctttcagggccggaatatagaagtgcatttcggctggcgcttcgctacctggggtcatcaggaagtcaaactccaggccgtcgataatcatcttctcgccagttctgacgatagttttcgtcggtgcaataatgctcgggtcgcccgttgccagcgtcacgccaaggccattacccacattgccttgcgcgttgtgcggcagtaacagaccgtaagagtagagcgcacggcggctcatgatgttacccgccagcacgttttcgctgatggcttcgtccataaagcctgcaggggcaatcacctgaactttgccggatttaacatcggcttcagagataatgcctttcacgccaccatagtggtcggtgtggctgtgagtgtagataacggcaacaatcggtttttgcggacgatgctggaagtaaaggtcaagtgcggcttttgcggcaggcggcgtcaccagcgggtcgataacaataatgcctttctcgccctcaacgaacgtaatgttagagatatcctggccgcgcacctgatacattttatcggtgactttgaacaggccagaaataccgttgatttggctctgacgccacaggctggggtttacggtttccggcgctgcggcattaatatcaaatttgtaatcgtccgcgcggtagtaaactttaccgttcgcatcacgcagaataccttcatccagcagcggggcgataaatccacgctgggcatcgtcaaaatcctgacgatcgctaaacggtaaacttttggcgtaattctgattaacctgttgggtatattgagtggcggctttcgcttcctctttcgcgttagcggtatttaccatcatgccgctggcggcagttaacgcaataacaatcctgctcaaacggaataaccgagagttattcatataaatctccatttatcatttatgtcgtaaatatgtaatccatgcaaaatacgtcatttaaagctggcgttatcataattgggaaattgcgactttaataagtggaagtgtgagcggaacgcgccattttattaggcatttgtgctgaagagggaaaattacagtaaaactatcattgcagaaaataatatgagtcgttttatgtgtttattatatatattgtacctgtcgttggcacagcgggacattgcgctactgtgccaacgttttactcatggggctttagcacagaactgtggcaaaaaacgttgatgcgccaatattgctgcaccctgagcgccattaaagtcagaagaactggcggcaataaagcgcacgacctgatgcggcagtggacggcgcaggtacttttgggtcatggcaacgagagtctcgcgtgggaaggcgggcatatccatcacgccaccgcccaggatcaccgcatcgggatcgaacagattaatgctggtggcaatggcccgtgccgcgttttcaagcagactctggacgaaaggggcgttttccgcatggacgaaaagatcgcgcaatgggtaatttcggggctgttgttcgtaccagcgtcttagcgccattccagagcaattggtttccaggcacccaggattgccacacgcgcagtgttgggtcatatctcccagggggatatgacccagttcgcctgccacaccgtgtgcacccgtccacggcgcaccgttcatccacactgcgaaccccatccccgtaccgagataggccgccagaaccagttgttgcgtaaggcggttttctactacgtcccaggagagttgcaggttaacgtcgcgggaaaactcaaccggacaattcagcgtattttcgagcttatcggcgagatcatataaatccgccgctgttaacggcaggttaggcgtagaaataatggtgcgtttatctttactgaccagcgccggaaatcccatcaccagaccatgacagcgagcgttaaagcgcctgagttgctcgtcaatcatttcgccgataccgctcaccaggccgggagcaatgacttctgcggtccgctttttttcgcagtgtagcgtttcaccttctgctgtccgcagacaaaagcggatatgcgttgcccccatatccacgcccgctacgacgttatgctgtttttgcatgaggctgtacctcgctttttgcagccagaatctgcgcggtcataattctccatgcttcgtcgatattttccgcatgattaaacaggccggaagtgccgacgataaagacatccgcccctgccgccatcagtttttcgtaagttgcctggttgcaggaaccgtccacctcaatttcgtactccagaccttctcgttcacgccatgccttcagttcggcaagtttatccagcatttcaggaatgaacggttgtccggcaaagccgggatcgacagtcatgaccgtaattttatcggccttatggatatagtatttcatggcctcaactggcgtctccgggttaaggatcagccccactttcatgtcatgacggcggatttcatcaatcaggcggaacgcctggccgttgatggtttccggatgcagagtgatgaaatctgctcccgcacgcgccagttgagcaatgtaatcctgcggccgcgtcaccatcagatgacagtcgagcggtttagttgccagttttttaacctgacttacgaagaacggactgagtgtcagattggggacaaagtgaccgtccatgatatcgatgtggaagtaatcggcatggctgtcgataaattcgatctgttctttaaatttcagcagatccatacacattaagctgggggagattttcatgttcaattccttacttactgataagacggtcaagggcgacagccgcgataattaatccgcccatcaccaccagttggtaataggtttgtacctgcaaaatattcagaccgttgttgatggtgccgatgatcaacccgccaatcaccacagagaaaatgcgccccttgccgccgaagaaactggtgccgccaatgatggcgctggcaatggcataggtttcaaaacccataccggcaagcggttctgcggcaccgagtcgtgcagtactgacgacgcctgccagacctgcacaaacaccggagatgataaacaccaccaggatgtggaatttcacgtcaatcccggaatagaacgcgctatttttgttgccgcccagtgcgtagatgttgcgcccgagccgcatacgcgttgtcagaaaccaaaggatgagcgcgacaattagactgaagataacggggacaggtatcccaattacgctggcggcaaagaagttcacgaagtcaaaactgaagccgtatacgctgttggcatcggagatcaccagcgtgatcccacggaaaatcgcgttggtgccaagggtgatgatgaacgggtgtagccccgtccagttgaccaggcagccgttgatcgcccccagtgcgccgccaaccagtacaccgccaatcatcgctgcgagaaacgggtcaacacctgccaacatcagtttggcggtcaccataccggaaagcgccagaatcgcgccaacgctgaggtcgataccagcgaccaggatagcgaaaaactcgcccatgccgatcaataccgtcacggagctttgaacaaaaatctgggtaatattattggtggtcagaaaatattctggactcaggctaccaaagatggcgacgatgatcgccaggataaaaaaggtgccgtatttatcccagaacagcgcaaagttgaacggtttcttctcgctcgcttcgctttttactcttgtggtaaagcccatgccataatctcctcttcgctcatgtcatcgcgattcgtcaggatttgcgtcagtcgtccttcgcagaacacggcgatgcggtcgcagacggtgataatttcaggtagttcagaactcaccatcaggatgacttttccgtcgtccgccagttggcgcatcactttgtaaatttcggctttcgcgccaacgtcgatgccgcgggtaggttcatcgaaaataatcacttccgggcaacagcacagccatttggagatcaggactttctgctgatttcccccggagagttcggtgatattctggtttacgctatgacatttcagcgccagcagttcgcgttgattttcagcggtacgttgctcgtcaacttcatgaaacaagcccatcgcgcctttatagccgccgtctttcagactgcggctgatcgccatgttctgagcgatggaaaagttggggaaaaaaccgttatcccggcggctttcagtgatgtaagccatcccttttttcacggcatccaggggactacgtggagagatatctttgccattaagacggatttctccgccagcgcgtttatccacgccaaacagacaattcatcagttcagtacgtccggaaccgaccagtccggcaaagcctaatatttctccccggcagacgctaaaactgatatcccggaccttttttctgtcacgactggtgacgttccgcacctcaaaaaccgtttcgtgcgcaaggttgctgacattctccttcatcgcgttaaaacggttttgcagttcgcggcctaccatcagacggacgatatcgtcattactcacatcgcttactatgccgctgcaaacgctgctgccgtctttcatcaccgtatagcggtcgcaaatacggcgaatttccgccaacttatggctgatatagacgatggccgtaccctctttacgcaactgattcatgatcagaaacagatagtccacctctttattggtgagactggaggtgggttcatccatgatgatgactttggcatcgagcatcagcgttttggcaatttctagcatctgcttgtggctgatagataaattcgccactttctcatctagatcaactttcaagcccacgcgtaataacatcatggcggcgcggacacgcatttctcgccagtcgataatattgacgccacagatttttttcgtcagatgacgaccaatatataaattttccagtacggttaattcatcaataacgctgagttcctgataaataatcccgataccgagttgtgccgctaatttatgatccagcttgttatagctaatgttattaatggtaatggtgcctttggtcggctcatgtattccggataaaactttcattagcgtggatttacccgcgccattttctcctagtaatgcatgtatttcaccaggataaaccgttaaattaacgctctttaatgcgtgaaccggaccaaaggacttgccgatccccgccatgcttatatatggcgtggccataaataacctctctgcacgaaatatcgtattattgcctgatggctacatttatcaggtctacgttcaggttattttgttggccggataagacacttcattagcatcatcatccggcatcattcagttttattgagtgaccaggatactatcgaccagtttaaattccggtgctttatccagcgggataaccttgccggatttctcagcgtcaaccatcagcttcagacccgttgcgccgatatccgccgggttctgggcaaccgtcgcggtcatttgtccggcttccaccattttgcgggcttccggaatgccatctgtaccgacgaccagcacttttcccgtttttccggcgtttgcgactgcctgagcaacacccattgccatcgtgtcattcgcgcaatagatcgctttaatattcggattacgttgcaacacgttagtggcgacatccagtgctttaatgcggtcccagtcggcaggctggctggcgacaagcttgatctggcttgcttttttgaaggcttcggtggcaccattacgacgcgcttcaccggaggcgttaccggctttaccctcaatgattgcgacttcaccaccttcagcgcccaatttgtcaataatgaagctcgcgcctttcgccccgacagcaacgttatcggtggtgacaaaagcttccacattgccgccagcttttttcagattatccatgtcgattttttcatcgagattaaccagataaatgccttttttccatgcgcgggcgacaggcatgaccagattcacactggataatggagcgaaggcgatacctttgtaatttttattactgagatcttcaaataactgcaattgagattgaaaatcgccttcactaggagaggcaaaaatatcaacgctgacgcccagtgtttttgcttcatcttcaatgccttttttcatatctacccaaaatgggttggagagggttttcaatacgacagcatattcggcggcagcaaaagcgctggtactcaacattaagcccacgagtgtgccgctgaaatatttcagatatttattcataataatgttctcacggtaaggggacaggtaactccgcgatggcggaattacctttttcttatttcagcgcgcctggactgaagaaatcaacaattgcgccggttttttgcatattaatattagcttgttcaatgttgagctgggcgacagagacaaaaaaagcgtccagcaaagttagttgtaatattcttgcgctggcattacgacctaataacggcgtttccggggctggactgcaaataatataatcggccagtttcgctatcggactatggtagctatgggttatacaaataatctttgccccgttcttttttgccagttctacggccgcttttacatcactggttcgcccggaatgggtcactaccagcacaacatctccttcctgtaacaagctagcggacatcatcatgatgtgagcatcaggataggcctgacagcgtacgccaatgcgcaagaacttgtgctgtacatcagcacagatagcattacttcctccggcaccgtacaaatcccgctgtctggcctgatagaaaaagcgggcggcacggtggatctcatcaacgttgacgatgctctgaccttccataatggtgcgtaaagtgatgttaaataccttattcaccacatcctgcggcgcttcatcaaaagccaactcggaaggcaatacctgttcactctgagaaaaataatcttccagcgcactgcgtaagttacgaaagccgctaaaccccagcagcttacttaccttaactatcatcgcttcagataccgccagagcttctgcgacatctttaattgcgggtgcacaactcaggttaccgggtttgagtaaccactccacgatgcggctttcattttctgtcattccttcctgcttcattcgcaggtaaggcgctaaccctataccgttcggaagcgcactatcaaactcactctggctcatcacgttctcttgtccttgaattgaagacgccactatatcaccacagcaagaacagaaaagatgctggcgacttcacaaaaaaataaaatttataaagtttattttattgtgaacaatggcgagtggcttaaaattttatttcatttaattagtttaaaaacatgatgttatttgtttttctggttttttagatgatagatgttgctggatggtgagtgtctttaacgctattgcgctgtcagatgtaactctgtaaaacagatcaggaaggcgtaattcatcgattttgggtgtttttaattcattaacatcacaaatgttttttgattgtgaagttttgcacggacggggaagatgaatgaaaaagattgcatttggctgtgatcatgtcggtttcattttaaaacatgaaatagtggcacatttagttgagcgtggcgttgaagtgattgataaaggaacctggagcagtgagcgtactgattatccacattacgccagtcaagtcgcactggctgttgctggcggagaggttgatggcgggattttgatttgtggtactggcgtcggtattagcatagcggcgaacaagtttgccggaattcgcgcggtcgtctgtagcgaaccttattccgcgcaacttagccggcagcataacgacaccaacgtgctggcttttggtagtcgagtggttggcctcgaactggcaaaaatgattgtggatgcgtggctgggcgcacagtacgaaggcggtcgtcatcaacaacgcgtggaggcgattacggcaatagagcagcggagaaattgagattcatccactacttgcatggatgagtaatgattaatgtggatagagtttctttttgaggttggctaatgaaacgctttccgctatttcttttattcaccctgctcacgctgtccaccgttccggcccaggccgatattatcgacgacaccattggcaatattcagcaggcgattaatgacgcttataaccctgaccgtgggcgagactatgaagatagccgcgacgacggctggcagcgtgaagtgagcgacgatcggcgcagacaatatgacgaccgccgccgccagtttgaagatcgccgcaggcagctggacgatcgccagcgccagcttgatcaggagcgtcggcaactggaggatgaagagcggagaatggaagatgagtatgggcgatgaggttgggtatggagcaggcatcgcccctcaccccaatggggagagggagaaaacgagcgcaatattcaatatcgagcacaatcggtcccctcgcccctctggggagagggttagggtgagggggccagcgcgcacattccctctcatcacgccaccccaatctccatcccatcaaaccccacctcaaacccactcggtagtgcgttttccatcagccacgcatcaaactggtggctgatatgggtcagaatcacccgtgggctgcggataacctgattcagcgcaagcacggtatttaaatcacagtgattacgcggtgcatccgcgcgcggcgggtgactgcaatccatcaccattacctgcggctgattattgcgtaaaaatttcagcgttttttccggcaagcctgcggtgtcagacagccacgccacccggctgtgtgccgtttccagcagataaccgaaggtcagtttactgtggttgagcggcaggggcgtgacctgtaacccctgcaaatcaaacaccacaaacggttccaccgtgtggctgaaatcaagcaggcccggatgtttaaacagatcgtcgcagccctgttcatccggcgggccgtaaaccgggatcggatcgccaacgccccagcgcagcggaaacagcccctggacgtgatccatatgataatgcgtcagcaaaaactgctggaagcttccggggctccagcgatcggcgagatcgtgcagcccggcgtcgatcagggtgattgcgtcgttaaacttcactacgccgctgcacggttggcggcgatactgcgggctgcgccgcgctctggcgcaggccgcacactcgcagccccatgccggaacgccctgtgcgccgccggtgccggtgagcgtgagggtcaggctcatgttacagcgccttggtgaagcggaagtggctctgctcgtagccttcgcgcagatagaaacggtgcgcgtcgtggcgcttcacgttggtgctaagttcggtcatttcggccccggcctggcgggcttcttcttctgcccacgccagtaacttactgccgacgttcagaccgcgcgcctgcggcattaccaccaactcctgaatttcgccgatccagttgacatgatgcagatgaaactgcaaatgcaggccgatcatgccgacaacttcgccatcaagcagcgccagatggtagcgcatgtttgggtcgcgcagattggcgttaaaacccacgcgaaacgcgtggtggtcaaactccgcctgttttagctcacaaatcagcgcgtaaaccgcgtcggtgtcgtactgcgtggccgggcgaagctcacaagcaggcatggtgtttctccttctgatggatcagcgtcagcagcgtgtcgacgctctggcgcaggctgccgtcattgttgagcgtatggcaatcctgtggagtatagcgggcggcgcgcgccaggcgggcgttaatttcactggcgttttcacggccacggttttccaggcgctggcggaggatctccgggctaacctgtaaacagacgggcagcagcgcgctttgatagcgcgcccgcgcctgcggcagatgggcgcgactgccgttgaccagcacgtcgaatccggcgtgcagccagagatcaatctcgacgccgacgccataatacagaccgttagcgtgccagcttaaggccaacagattttgccccgcgcgggtaaaaaactcctgctcgctcagggcgatatggttttcacttccggcgctggcatcgcgcgtgatgtagcgatgcgccaccagtaactgagtttgttcccgcaggcggagttccgccagcaggctgtctttcccggagccggacggccccattaaccaaatcagttttcccatcatcagaacacccttttaccctgacgccagacgtggtcgatatgaatatgattgtccttgcgatgcgccagcaccaggtcggcgcgtttgccctcgccaatcaccccgcgatcctggagattaagcgcctgcgctggatttttagtcaccagcttcaccgcctgcggcagcgtaaagcggttgctctggtcatcggcgacgcgaaatgccgcatcgagcaggctggcggggtagtagtcggaagagaggatatccagcaggccaagctgcgccagttcactggccgccacgttgccggagtggctgccgccgcgcacaatattcggcgcgcccatcagcacgttcatgccatgcttgcggctggcttccgccgcttcgaacgtggtgggaaattcggcgatcacgctgccaagctggtgagattcagcaacgtgggcgtgggtggcgtcatcgtggctggcaagcgcaatttttcgcgcgcggcacagggcggcgatggattcgcgattcggctggctccagcgtgcggcgagcgccagttgctcttcttcgtactgctgcatctgcgcatcagtgagggagtatttgccctgataatattcgcgatacttctcgcggttggcgaactggcgctggcccgggctgtggtccatcaggctcaccagcgtcaccggctcgcgctgcaccagtttttcaaacagcggcagcgtggtgtgatgcggcagttcgcagcgcagatgcagacggtgctcggcgcggttgacgccgcgtttctgcgtctcttcgatggcgttgatcatcttctccagattctccagccgatcgccgccgtcgcgcacgtcgccaattgccacggcatccagtacggtggtgatgccgctcgccaccatcagcgcgtcgtggctgctcatcgcgctgtgggcaggccagtcaactttcgggcgcggggtgaagaatttatccagattatcggtatgcagctcaatcagccccggcagcagccagccgccttcgccgtccatcgcctccggcaggcggctctggctttcggcaaaggcgcggatttcgccgttctgcacctccaggctaccgcttaccacctcgttttccagcaccagcttaacgttattgataatcatgaagaggctcccattgggtgttagctcaactagaggctcccattgggtgcaggcggtcggcgacgtcattacgtacagcttcgtcatggaagatgcctacgatggctgcgccacgggttttggcttcgcgaatcagttccaccaccgcggcgctgtttttggcgtccaggctggcggtaggttcgtcaagcagcagaatggggtagtcgacgataaagccgcgggcgatgttgacgcgctgctgttcgccaccggaaaatgtgcttggtgccaggtgccacaggcgttccggcacgttcaggcgggtgagaagacgcgcggctttagcggcgcaggcttcacgcggaacgccggtatcgagcagcggctgcatcaccacttccagtgcactgatacgcgggatgacgcgcagaaactggctcacccagccgacggtggttttgcggatttccaccactttgcgcgctggcgcggtgaccaggtctacccactcgtcaccgtgtttgatctggatttgaccttcgtcgggcagatagttggcgtacaggctgcgtagcagagtacttttgccgctgccggaatggccgtggagcaccacgcattcgcccgcgttgacggtgaggctggcgcgattgaggacgggcaggcgcacgccgttttgctggtgcaggatgaaggttttactgacgttttgtacgttaatcatttttcgcctcgtggttcgggtgtcggatgcgacgctgacgcgtcttatccgacctacggggagcgcatttgtaggccggataaggcgtttacgccgcatccggcaccggctcaattctgcaaaacgctactcaccagcagctgtgtatacggatgatgcgggtcgtcgagcacgcggtcggttaacccactctccaccacttgcccctgcttcatcaccagcaaacggtccgccagcaggcgggcgacgcctaaatcatgggtgacaatcaccaccgcgaggttcagctccaccaccaggccgcgcagcaggtcgagcaggcgggcctgcacgctcacatccagcccgccggtcggttcatccataaacaccagcttcggatgcgtcaccaggttgcgggcaatctgcaaacgctgctgcataccgccggaaaaggtggtcggcaggtcgtcgatccggttggcgggaatctccacctcttccagccacttctgcgcggtggcacgaatatcgccgtaatgacgtgccccggtcgccatcagccgctcgccgatattgccgcctgcgctcacctggcggcgcaggccgtcgagtggatgctgatgcaccacgccccattcggtacgcagcaggcgacggcggtcggcctcgctcattgcatacaggctacggttctcgtagtgaatttccccctgctgcggcgtcaggcgcgcggagatgctcttcagcagcgtggtcttcccggagccggattccccgacaatgcccagcacttcccccggccataaatcaaaagagacatcgctaaagcctttgcccggcgcgtaaaggtgggtcaggttattgacgctaagtaacggttgattcattggttttttgcctcgctctgttggcggcaataatcggtatcggagcagacaaacatgcggtttccggcgtcatccagcaccacttcatcaagatagctgtgggtgcttccgcagatggcgcatggctcatcccactgctgaacggtgaacgggtgatcgtcgaaatcgagactttccacgcgggtaaacggcggcaccgcatagatgcgcttctcgcgccccgcgccgaacagttgcagggcgggcatcatgtccatttttgggttatcgaatttcgggatcgggctcgggtccatcacgtagcgcccatttaccttcaccggataggcgtaggtggtggcgatatgaccgaagcgggcgatatcttcatacagtttcacctgcatcacgccgtactcttccagcgcgtgcatggtgcgggtttccgtttcgcgcggctcgataaagcgcagcggctcggggattggcacctggaagataattatctgatcttcggtcagcggcgtttcggggatgcggtgacgcgtctggataaccgtcgcatcgtccgtacgttccgtggtgtttaccccggtcacgcgcttgaagaagttgcgaatgctcacggcgttggtggtgtcatccgcgccctggtcaatcaccttcagcacgtcgctttcgccaatcacgctggcggtaagctgaatgccgccggttccccagccgtacggcatcggcatctcgcgcccgccaaacggcacctgataaccggggatcgccaccgcttttaagatggcgcggcggatcatgcgtttggtctgctcgtcgaggtaggcaaagttgtagccgctcagattagccatggttctgctcctgttgcagacgtttgagtagctccagttcggcctggaaatcgacgtagtgggggagtttgaggtgactgacaaagcctgcggcttcgacgttgtcggcatgtgccagcacgaactcttcatcctgcgccgggcctgtcgcgtgctcgccgtactccggggcttgcagagcgcggtcgaccagcgccatcgccatcgctttgcgctcgctcatgccgaacaccagcccgtagccgcgcgtgaagtgcggcggctcacccggcgggtcgataaaaccgttaaccatttcacactcagtcatcagcagttcgccgacgttcaccgcaaatcccagctcttccggcacaatgctcacgtcgatatagccgctgcggatctcgcctgcgaacgggtgattgcgcccgtaaccgcgttgggtggagtaggccagcgccagcaaatagccttcgtcgccgcgcatcaactgctgcaaacgggaggagcgactgcaggggtaaaccggcggcgtgcgggtgatgtcatccggctgtgcgccgctatcctcttcaaacttcgccagcccctgacgcgccagcaggctgaaaacgtgcgggctcggctgctgttcgctgtcggcggtggtcagcgtcggcgcttcgccgtttgccagcagggtaaaatcgagcaggcgatgggtgtagtcgtaggttgggccaagcagctggccgccgggaatgtctttataaacggcggagatacggcgttcgagacgcatcccggtggtgtcgagcggctcgcttaccgccagcttcgccaacgtggtgcggtaggcgcgcagcaggaaaatcgcttcaacgttatcgccgctggcctgtttcagcgccagcgccgccagttcgcggtcggcaatgccgccttcggtcatcacgcgatctaccgcgaggttaagctgctgttcaatctgggcgacgctcagttcgggcaaatcggtatcgcctcggcgtcggctctcttgcagggcgtgggcggcgtcgatcgccttctcgccccctttcacggcaacgtacatcagcacacctccacatgagtggttcgcggaatagccagcaggcgctcgccacaggtcaggatcaggtcgatgccgagcgggaacggatgcgggcgctcggtgagttcgtgcagaatgcactccggcagctgcggagcgatcattcgttcttcggcaatacccgcaccagtaaggcgcaacatgcgtccgccgctcaggctggcgacctgtaaaatcagcgtcgcacccgcttccggcgcaacggcggtgccggtggaaagggcgttgagctgttcgctggaaatcgcctcatccgtcaccgcgaaggtcgcctgttccggctggctgaccagcggcgcgttggtatgaaaacgcaggctctggttgacgatatcgttatttaatggggtagaaagccacaccggcgtgtcgttatcggccagcgtcagcagcacgctggtggtggcgatattcagcggttgccagccgcgtttgagctgatgcagggcgacaatcacgcccggctcgctcatggcctttaacaggcgacgaaaactgtgctgggcatcctgcacgggaagcataaaagcggtttccagggtcatgcgttgtctccgcgaaccatcgtaaagaagtcgacccggctggcgttcacttcggcctggcgtgcggcaatgcgtgccatacggtcagcgtccagcggggcaataagggtttcacttaagttttgaaagtggcgagattgctgcatcagcgcgtcaatcagcgcgcagcgttcggcgtgctgtttatcacgcccctgcacccagctgtagccgagcgtgccgtcagtcaggcgcacggcggcgcgggtcagcgtggcgtcgccggcaaaaaaacgttcgccggtgccgcccatccgcgcctgaatctgtaccaggccagtttcagcggcgcggatcacctcatagtcggcggtgatgtttagcgcgttcaggcgtgctgccagttcagccggttggctgtgcgccagcacggacatccagtgctggcgggtcgcggtatctgcgtgcattcagtgctccatagtgaattcaatcatgtcggcgcgcgtcaggctgacggagtactccgccgggctgctttcaccgtcacggtggttaagggtgcgcacgcacagcagcgggctcatattcgggatttcaagacgctggcactctttggcctgggcgcggcgggcgctgatccgcgtctggctgcggcgcagcgcaattccggtttgctcgcgcagaaaatcgtgcaggctgccgctgtcgaagcgttgcagcgtcggccagagggtgaggtccgcgaagtagtggtcgattaaacagagcgcgacgccgttgacacgacgcagggtgcgcaggtggatgacgttctccccctcggtaatccccagtgcgtcagcgacgtggccggacgcggggcgcaatacgctaagcagtttttcgctggtgggatggctgccctgatccagcagattctggctaaaacgcgcctgggcgttgagcgggtaatcgaacgggcgcatcagcaccagcacgccgacgccctgacggcgctgtacccagcctttttccaccagttggtcgatggcgcggcgcagggtgtggcgattcacctcaaagcgcgctgccagttgctgctcggcgggaagatagtcgccgcagcggtagtgttgacgaagctcctgctcaagttttgcggctatctcttgatagcgtgttgggtagctggtcggatgtgtagacaagtgcatagatatcaatgcctcgcttatcagataaagtgcttacgcaaccgttgagagaggaaatccagcaggctgaccgtgacgatgataagcaccatcagggcgcaggtttgttggaactggaaaccgcgaatcgcttcccacagggtgacgccgatcccgcctgcgccgaccatgccgacgacggtcgccgagcggacgttggattcgaagcgatagagggagtaggagatcagcagtggcatcacctgtggcagcacgccgtagaggatctcttcgagcttgttggcaccggtggcgcgaatgccttccaccgggccgggctcaatcgcttccaccgcttcggaaagcagcttggagagcacgccggtggtgtggataaacagcgccagcacgccagcacgccagcgaacgggccgaggccgacggcgaccacgaacagcatggcgaagaccatttcgttaatggcgcggcaggcgtccatcaggcggcgaacgggctggtaaacccaccacggcaccaggttttcggcgctcatcaggccaaaggggatggagagaaccaccgccagcgcggtgccccagacggcgatttgcagcgtgacggccatttcggtgaggtaatcctgccactggctgaaatcgggcgggaagaagtcggcggcgaacgtcgccatgttgccgccgtctttgatcagcgtaagcggggccatttccgcgccctgccacgagacgaccaacacggcgagtacaacggcccagctcagaagcgagaaccagctgcgcttgggtggggcgatggtgatggtttgcatgtttggctccggtctgtaggccggataaggtgcttgcaccgcatccggcatcaacgcctgcacattgtcggatgcgacgccggggcgtcttatccgacctacgatttactgcaccgctttactcacgctactcatcgcgcttagcgcgttgttcaggcggtccaggtcatccagctgcgcctgaatctcggtggtttttgccagcttgtcctgctcattcagtcctttattgcttttcacgccctgcatctctttaaacagcgcgagctggcgaatcggcaccagttgcaggtcgctggaagcgcggaatggcgcccagcccaggcgttccagcaccgctttttcttccggcgttttgccgtagttcataaagaagtcgtagatcttgtctttggtggtttcggaaagattcttgcgccagacgatcggatcgcctgggatcagcgggctcttccagatcaccttcagttctttcagcttctctggcgcggaggttttcagcttgtcgaggttttcggtgttgttggtggcaacatccacctgcttgttggcgacggccagcgcgttggtttcatgcccggcgttgacggtgcgcttgaagtcgctggcggagatattgtttttggcgaagacgtagtagccggggacgaggaagccagaggtggagttaggatcgccattgccaaaggtgagatctttccgcttcgccagcagatcgttcaggttgttgatcggactgtctttgttgacgatcaacacgctccagtaacccgggcttccatccgccgcgaccgtctgggcgaagacctggccattggcgcgatccaccgcttccatcgcgctcagattgccgtaccaggcgatatccactttattgaagcgcatcccctggataatgcccgcgtagtccggggcaaagaaggcgttgaccttcacgcccagcttcttctccatatcctgcaagaacggcgtccattgcggtttcaggttttgctgactttccgtactaataatgccgaaattcaacgccttttcctgctcttcggcgtgcgccgggcttaacagggtgctgaggctgaacatgctggtgaaggccaggctggcaattatcttagcgttcattcgttttcctcaatgatggggatgtcaggcagctttcgcgttctcttcgacgcggttaatgctgcggtagagatggtcaaaacgttcgttatcaaactgttggctgctgccgtcgtagaagacgtgcccctggcgcagggcgacgatgcgttcgcagtagcgcagggcgtaatccacctgatgcagcgtgacgaccacggtgatgccgtcgttctggttgatgtcgcgcagggtgtccatcacgatgcgcgcactttctgggtccaggctggcgatgggttcatcggccagaatcactttcgcctgctgcatcagcgcacgggcaatcgccacacgttgctgctggccgccggagagggtggaaacgcgctgatgggcaaaatgcaccatgccaacgcgggtcagcgcctgtaacgcgcgctgtttctgctcgccggtgaaccagctaaaacaggtgcgccagaacggcgtgctgccgagcgcgccaatcagcacgttctccagtacgctcaggcggttcaccaggttgaattgttggaatatgtagccggtatgggcgcggcttttgcggatatcgcgggccaggcggccttcgcgctggactgtgcggcccagcagctcgatatggctaccgacagatttatcgccggtaatcaaaccgcttaagtgacgtaaaagggtggattttccggaaccgctcggcccaagcagagccaccatttcaccgtgatgaatgttcagatcaaccgcatgcagcgcctgatgctgattgaaggttttggcgagcttctcgacacggataatcgtttgcatgatgcagcctccctaaaaaagtggctccatcgtggcggattattgtgacgatttggttaattaaaagtgactaacagatgaagagttaacgggaattcgatgacagtgcgggagggcgggcctcccggcgggttattgcgttggttgttgtttgacgacattaatcatccacggtacgccaaatttatcggtgactttgccaaagccatgcgcccagaaagtttcctgccaggccatttcgatttttccgttagcggcaagattgtcaaaccagcgttttccttcttcgacctgttggctatcgagcaccagcgtaaagccggagtagctggcttttccactcggcatggcatcgctcatcatgatgtcgcttccggcaatgcgcacattggcgtgggcgatggcggtatcgggaaattgcattccggaagggcagttctcggcgctgtcctgcgcactttttggcatttcgccgaagctgattttatagagcagttccgcgcccaacgtacgttgataataggcaatcgcgtcggaacagttaccggcaaaagagaggtagggacttaacggcatgatggtgacctcagttaagagaagccagttaagtgtagttcgaaatttatacagatgagaggcggcctgataagacgcgcgagcgtcgcatcaggcagtcggcactgttgccggatgcggcgtaaacgccttatccggcctacggagggtgcgggaatttgtaggcctgataagacgcgcaagcgtcgcatcaggcagtcggcaccattgccggatgcggcgtaaacgccttatccggcctacggagggtgcgggaatttgtaggcctgataagacgcgcaagcgtcgcatcaggcagtcggcaccgttgccggatgcggcgtaaacgccttatccggcctacggatggtgcgggaatttgtaggcctgataagacgcgcaagcgtcgcatcaggcagttggcactgttgccggatgcggcgtaaacgccttatccggcctacggagggtgcgggaatttgtaggcctgataagacgcgcaagcgtcgcatcaggcagtcggcaccgttgccggatgcggcgtaaacgccttatccggcctacggagggtgcgggaatttgtaggcctgataagacgcgcaagcgtcgcatcaggcatctggcaccgttgccggatgcggcgcgagcgccttatccggcttaccgatcacaatacaatcagttctttttcacaaactcagatttcagtttcatcggaccaaaaccgtcgattttgcaatcgatgttatggtcgccttcaaccaggcggatgtttttcactttggtgccaattttcagcatgctagagctacctttcaccttcagatctttaatgatggtaacgctgtcgccgtcagccagcagattgccgttagcatctttaacgatcagctcgtcgctttcctgtgcaggttctgcgtcgttccattcgtaggcacattccgggcagatgtacatgccgttatcttcgtaggtgtattcggagttgcattttgggcagtgtggtaaactcatgtggatttcctcaaaagtcagcagggcaaaagcgccaaaaaacggcagattgccgaaaaaggccgcaattatacacaaaatccctgagtttgtcgggggtactgctgattttagacgacgatcgttttcatttgaaaggaaacgcaaaaagaaaataatctttttgcctctatttattatttaagataatgttaatgctctacttgttctttttttaattcacatgatatttttatctttctgacgttttaaacgtatcagaagacgttatttattctgataaaaaacaacacactaaatataaaattatttcttgcagtaattataaaagccgaaaacagaactcaaaaacaatctggctaaataaaataacaaaatttgctttaaggaagaattttctatgtacacacagaccctgtatgagttaagtcaggaggctgaacgcctgttacagctttctcgccaacagttgcagttactggaaaaaatgcctctctctgtacccggagacgacgcgccacaactggctttaccctggagtcagcctaatatcgccgaacgtcacgcgatgctgaataatgagttgcgtaaaatttcccgactggaaatggtgcttgcaattgtcggtaccatgaaagcagggaaaagtaccaccattaatgccattgttggtacggaggttctgcctaatcgtaatcgcccaatgactgcgctgccgacgcttattcgccatacgcccgggcaaaaggaaccggtactgcattttagtcatgtcgcgccaatcgattgtttaattcaacaattacaacagcgcctgcgtgattgcgatattaagcatctgaccgatgtgctggaaatagataaagatatgcgtgcgcttatgcagcggatcgaaaatggcgtcgctttcgaaaaatattatctgggtgcccagcctatttttcattgtctgaaaagtttgaatgatttagtgcgactggcgaaggcgctggacgtcgattttcctttttctgcttacgccgccattgagcatattcccgtgattgaagtggagtttgtccatctagcggggctggagagttatcccggtcagttgacgttactggatacccccgggccaaatgaagccgggcaaccgcatctgcaaaaaatgcttaaccagcagctggcacgcgccagcgcggtactggcggtgctggattatacgcaactgaaaagcatctccgatgaagaggtccgtgaggcgattttggcggtggggcaaagcgtgccgctgtacgtgctggtcaataagttcgatcaacaggatcgtaacagtgacgacgccgaccaggtgcgggcactgatttccgggacgctgatgaaaggctgtattacgccacagcagatatttccggtgagcagcatgtggggctacctggcgaatcgggcgcgctatgagttagccaacaacggtaagttaccaccgccagagcaacaacgctgggtggaagattttgcccatgccgcgcttggcaggcgctggcgtcatgccgatctggcggacctcgaacatattcgtcatgctgccgatcagttgtgggaagatagcctgttcgcccagccaattcaggcgttgcttcatgccgcttacgctaacgccagcttgtatgctctgcgatctgccgcgcataaactgttgaattacgcgcagcaggcgcgggaatacctggattttcgtgcgcacgggttaaacgtcgcttgtgaacaattgcggcaaaatatccaccagatcgaagaaagtttgcagctattgcaactcaatcaggcgcaggtgagcggcgagattaaacatgaaatcgagctggccctgacctccgccaaccactttctgcgtcaacagcaagatgcgctgaaggtgcagttagccgccttgtttcaggatgatagcgagccgttaagcgagattcgtacccgctgtgagacactgttacagacggcgcagaacaccatcagtcgcgactttacgctgcgttttgccgagcttgaatccaccctttgccgggtgttaaccgatgttattcgccccattgagcaacaagtcaaaatggaattgagcgagagtgggtttcgtcctgggtttcattttcctgtttttcacggcgtagttccccacttcaacactcgccagctgttcagtgaagtcattagccgccaggaagcaacggacgagcagagcacgcgtttaggcgttgtgcgtgagacttttagccgctggttgaatcagcccgactggggacggggaaatgagaaaagtccgacagaaacggttgattacagtgtgttgcaacgagcattaagcgcagaagtcgatctctattgccaacaaatggctaaagttctggcagagcaggtcgatgaatctgttacggcaggcatgaatacttttttcgctgagttcgctagttgtttgacggaattacagacgcgtttacgcgaaagtctggctctgcgtcaacaaaatgaaagcgtggtcaggctgatgcagcagcaattgcagcagactgtgatgactcacggctggatttacaccgacgcccagctgttacgcgatgatattcaaacacttttcacggcagaacgatattgaccaagacgttacttgacggccccggtcgcgtgctggagagcgtttatccccgctttttagtggatctggcgcagggtgatgatgcccgccttccacaagcccatcagcagcagtttcgtgaacgactgatgcaggaacttcttagccgtgtgcagcttcagacatggacgaacggcggcatgttaaatgcgccgcttagcctgcgtctgacattggtggaaaaactggcgagcatgctggatcccggtcatctggcactgacgcagatcgcgcagcatctggcgctgctgcaaaaaatggatcaccgccagcactctgctttcccggagctcccccagcaaattgccgccttgtatgagtggtttagtgcccgttgtcgctggaaggaaaaggcgttaacgcaacgaggcctactggtgcaggcaggtgatcagagcgagcaaatttttacccgctggcgtgctggggcgtataacgcctggagcttgcctgggcgctgttttatcgttctggaggagttgcgctggggggcatttggcgatgcctgccgtctgggaagcccgcaagcggtggcgttgttgctgggtgatttgctcgagaaagcgacacaacatctggcagagagtatcaatgcggcaccgaccacgcgtcactattaccatcagtggtttgcctctagcaccgttccgacgggcggggagcatgctgattttttaagttggctgggaaagtggaccacggcagataaacaacccgtttgctggagtgtgacccaacgctggcaaactgtcgcgctggggatgccacgactctgtagtgcgcagcgtctggcgggggcaatgctcgaggaaatcttctctgtaaatttggcgtaaataatcagttacatcaatgagtcctaaacgaaatccatgtgtgaagttgatcacaaatttaaacactggtagggtaaaaaggtcattaactgcccaattcaggcgtcaactggtttgattgtacattccttaaccggagggtgtaagcaaacccgctacgcttgttacagagattgcatcctgcaattcccgctccccttttgcggccgtcgcgctgatttttctggcgtttgcggaaatgggccaactctgcgaggaaagctatgctgaaaaggaaaaaagtaaaaccgattacccttcgtgatgtcaccattattgatgacggtaaactgcgtaaagccattaccgcagcaagtctgggtaatgcaatggaatggttcgattttggtgtttatggttttgttgcttacgcattaggtaaagtttttttcccgggggctgaccccagcgtgcagatggttgctgcacttgccactttctccgttccctttctgattcgaccgcttggcggactcttctttggtatgttgggcgataaatatggtcgccagaagatcctcgctatcactattgtgattatgagcatcagtacgttctgtattggcttaataccgtcctacgacacgattggtatttgggcaccgattctgctgttgatctgtaagatggcacaaggtttcagcgtcggcggtgaatataccggggcgagcatatttgttgcggaatactcccctgaccgtaaacgtggctttatgggcagctggctggacttcggttctattgccgggtttgtgctgggtgcgggcgtggtggtgttaattagcaccattgtcggcgaagcgaacttcctcgattggggctggcgtattccgttctttatcgctctgccgttagggattatcgggctttacctgcgccatgcgctggaagagactccggcgttccagcagcatgtcgataaactggaacagggcgaccgtgaaggtttgcaggatggcccgaaagtcagctttaaagagattgccactaaatactggcgcagcctgttgacatgtattggtctggtaattgccaccaacgtgacttactacatgttgctgacctatatgccgagttatttgagccataacctgcattactccgaagaccacggggtgctgattattatcgccattatgatcggtatgctgtttgtccagccggtgatgggcttgctgagtgaccgttttggccgtcgtccgtttgtgctacttggtagtgttgccctgtttgtgttggcgatcccggcgtttattctgattaacagtaacgtcatcggcctgatttttgccgggttactgatgctggcggtgatccttaactgctttacgggcgttatggcttctaccttgccagcgatgttcccgacgcatatccgttacagcgcgctggcggcggcatttaatattagcgtgctggttgccggtctgacgccaacgctggcggcctggctggtcgaaagcagccagaatctgatgatgcctgcctattacctgatggtagtggcggtggttggtttaatcaccggcgtaaccatgaaagagacggcaaatcgtccgttgaaaggtgcgacaccggcggcgagtgatatacaggaagcgaaggaaattctcgtcgagcattacgataatatcgagcagaaaatcgatgatattgaccacgagattgccgatttgcaggcgaaacgtacccgcctggtgcagcaacatccgcgaattgatgaataagctgaaacggatggcctgatgtgacgctgtcttatcaggccaattgaactcttaaggttcacttaatctctgacgcgcatactctcctccaggttaacggaggagagtgcaatgaaaaaccgtgtttatgaaagtttaactaccgtgttcagcgtgctggtggtcagcagctttctttatatctggtttgccacgtactgatctttcttcagccgtacccaggcccgcgtgccggaagtctcttgccggttttgcaggaaaaactgcccgtgatgcaactgtgtaatgcggctgacaatacttaaccccagaccaatcccgccataacggctgtccatacgtacaaacgctttactcaactccccgcatttactctcatcaatacctggtccttcatcttcaactgccatgaccgctccgtcatcttcttgcagcttaatcataatgttgctgccttgcgggctgtaacgatgggcgttttctaccaggtttcgcaataacatccgcagcagggttgcatcaccctgaacggtgatgtcggcggcgctctctggcaatagcagggtttgctgtcgctggtcgagcatggtactgagttcgtcatagctggggagaatgacatcttccagcagttttacatgttgataattaccggaagaaaaactctgtccggcacgcgccagttgcagcagctgggagacgctctccatcatctgatcaagccgtgccactaacggtgctacatcaatgtgatgcgttttcgccagcagttccagatgcaaacgcacccccgccagtggcgttcgcagttcgtgcgcgacgtcagcggtaaacaacctttcgttatccagcgtgctggtcaggcgactgaccagatcgtttaacgcgctaaccaccgcttcgatttcgagggtggcgctgtgaatggcaatgggcgttaagttgtcggcggtgcgcgcttccagctctttttgcagctccgccagcgggcgggtgatgcggcgtaccgcctgatagcagataaatagcgtcaggctgaccataaagacgccggggacaatcaggctggcgaccgcctcgcggatctcacgcatgatgtggcgatcgttgttgcgattgtcgcgtagcgcctgctcaaacagctgaatctgctcggtactttcatgccatagccagaagacgctgatcagctcaaacaccaacaaaatggccccgatggtcaatatcagccgttggcgcaggcttattggtcggcgcagaaaatgcatcagattcaattagttttcctcattcgcgaccagcatatagccaaagccgcgcacggtgcggatacgggctttgcccactttgtcgcgcagattgtggatatgcacttccagggtgttggtgctgggttcattgtcccagttatagatgtcgttgtagagaatttcccgatgcaccggactgcctgctttgagcattaaccgactcagcagagcatattctttgggcgtcagaatcaactcttcaccgcccatccatacctgacggcgacccatgttcagcgtcagattgccaacaatcagctcactttcgccctgattattatggcgtcgtagcagggcgcggatacgggcatgtaactcttccagcgcaaaaggcttcaccagatagtcgtcggcaccgacatccagcccggcgattttgtcggtcagcgtatcgcgagcggtgaggatcagtaccggcagggtatattttttctgccggatacgggcgagaaaatgcagtccatcttcgtcgggtaaccctaaatccagtaccaccaggctgtaatgacctgcctcaaggctttgttccgccatccgcgcggttgtcacgctatcgcacgcgtagccttcggtttgcgccgccagaatcagtccctgcaataacagcgtatcgtcttcaacaatcagaattttcattcactcactctcctgcaagtttgcagaatatcatccgcagcctggtaatacttcgtctcaacgccagttaatcccaatagcgtggagaataaattgtcttgactatagtgttgcgtttgcgcctgtttttgcaggcagttctggtcaacctgataccgtttttgataatcctcgctcagccacagcagcatcggcacctgtttttggctatccggggcgatggcataaggcagaccgtgcagatagatgccattttcacctaagctttcaccgtggtcagaaagataaaccaggctggtggtaaatttatcctgatgttctttcagcagattaatcgctttatcaacaatatagtcgacgtaaaccagcgtgttgtcgtaagtgttcaccagttgctctttggtacaggtctggatctcattggtgtcgcaggttggggtaaatttcctgaactgaggcggatagcggttgtaataggtcggaccgtggctgccgatggtgtgtaagacaatcacgccatcaccttgcaggttattgatgtactcttcaagcccgtggaacagcacttcgtcatagcattcgccgttgatgcactgatcaggtagattcagcgcggtgacgttctggtgaggcacgcggtcgcaggcacctttacagccgccatcgttgtcattccacagcacgttgatgcccgctcgctgaatgatatccagcacgccttcctggtgctgtgccagctcttctttgtagtgctcacgcggcatatcgctgaacatgcacggtacactaactgccgttgccgtgccgcaagatgcggtattagggaaatagaccacgttatctttcgccagccgcgggttagtttcacgcgggtagccgttgagggagaagttctccgcccggctggtttcgccgacaatcaggatggtcaaatttttacgtttttcgttctgcattaacgggttgcggtgcgcgtcttcaccaattcgcaccagcggcagatttgccagtcgctgatgggagtaccaactccagctggcaacaatgctgttagaggggcttaaggatttcaccagctctttgttattgcggaacaagctggcgtagtctttataaaacagtgcggcgaccagcaaaatcagtagtacagaaaccagaatattggctccacggaaaagaacactgcgcagacggctggtggcaggtttgatttttatccagcaggcaatcagcgcagcaagcacgccgctgaatcccagcgttaataacatttgcggtgtcatcagcgcataactttctgccggagtggtatcaataatattggcaatcatgctgcggtcgatgacgatgccgtaagtcattatgaaatattgtgcagccgcgccaaccagaataaacaggcaggccagtggtcgattaagccataagaaagagcttagtgtcaggacaatattaatcacgctgaaagcgacgaccggcatgctcaagaaaaccagtacgttatgcaggctatccagcggcagcgcctgcaacacctgtttaaaaaaggcaatattcaggcagatagagatataaaaagcggccaacaatagccaggcgagtaaattcaaagagggtctttttagtaggcgcttcaacatcacggtgtttccatcgaacaaagtgcgcatatgctcgcaaagcaaaattaagccaaccttaagttcttaaggttggcttttatgtttgctggattaaggggaattaatctttgcttattggtgcatctaagggatacgggtttttatgtagccggttgtaattcagcgcatacatggcggtgatgaccatcagggtgacaaaactccacataacctctttcgctccggaccccaccacggcccagatgcagtagaggaaggcaatggtagtaactgccagatatgccgggcgtgctttaccaaagtgaccgtgtccgagcagcagtaacgccgcacaggtgtaaagatatggcaccagtgtaaagatgacgctgacggaagaaaccagaccgaactctttggtcgcgtttggactaatgctgctgagctggaagatggtcatcaaaataccgacgataatcagccccgccactggcgtacccgctttatttacacgggcaaaaatcggtgggaacagtccgtcatcggcagcggctttcgccgtttgacccgccagcaacgtccagccgcccagactacctaagcaacccgcagctgcgcagaaggaaacaatggccccggcggtgtcacccaacgccatccgtgcggcatcaccgaatgggctagcagaaacgcgcagtgcggcattagggatcatccccataatcgcggtggtagaaagtacatagcaaacggcggcaatcaataccccaccaatggtggcgatagggacattgcgtttcgggtttttcaccacacctgcggcaacggaggcactttccacaccgatgaagctccacagcgtaacgttaagggtactttgaattgcaccgaaggtgcccaggccgctgacgttccatgccgccatataggtttcaccacggaaccagaaccagccaaatacggcaatcccgacgatggggatcagcgccagcacggtggcaactgcctgcacacgggtgatcattttcggaccgacaatgttcagcaggacgaagatccacagcaccacgacgcaggtgatggttaataccaatggatctttcagaatcgggaagaagtaacttaaatatcctacgccaatgaccaccatggcgatattgccgatccagcaggccagccagtagaggacgttggtttgataaccgagaaacgggccaaagcagcggcgggcgtaagcgtaagaaccaccaggacttgggtcgaggaagctcattttggcgtataccatgctgagccccagtgcaccgataatcgtcaccaaccatccataaatggcaatcccgccagtagaggccaggtttgcaggtaacagaaaaacaccactccccataatattcccgctcaccatcagggtgacggggattaagcccactttgtgagcatcagcatcgctagacataattaaactcctgcgaaggcgagcttcgtgacaataaattacgtcatatcatacgcctgcattcgatagttgaattattatcgaccgggttatcgctgatgccgttattaatatagctcttcgttaaggttaaaaatcaggcgacagtgcgttctctgtgctgactaacataatgcagcggcgtcataccgtagaagtctttaaagacagaaataaagtagctcgtactgttgtagccgcaggactgacttacctgagagatatttttaccgtccatcattaattcatttacggcataacgcatgcggcaggtggtgattatttggctataactggtgttttcgcttttcaactttttctttaacagacttgggctaagacataaacaactggctaccatactaagattccagtctttgtgaatatcgctttcaataatttgataaacgctgtcacttacacaattacgtaacatatacatcattaaactaacgaattttttactgtcgagaaaacgggatagcaccgtgaataataatgcgcgtgttcgttccttttcactctcagtttctgcgggcatcatgctgtgttgcgcggcaacgcgaaagacgtctggcgtcaggcatggcagggtgagtatgggcgtagcgctacgttgccatactggtatttggctgagatctttattcagaaaccggaggtaatctttgatgatgtcgtgactaatatgagcaaccaaagtgttgttaagagaggagacgtcgataatattattttcacaatttaataacgccatatggttagctttaaggctaataggttctttcccattcacccttatccagacatctttttcagtcaataaaacaatacaaggttggtcgctgcaaatcctcatacatgtactcctgagtgcgaataaaagaccagttctcgctaaagcaaagcgataccgggaaatggttatataattgtatgatgaatataaacatgcataaaaataacgagttttactaatagtacaaatttttatagtaatttctcatgtacatatttttttacaggataaataacaggcaaaaaaaagcgcggggtggggccgcgcaaaaagtatgacatttttgtttgcagcaatttttatgaaaacgttgccatactcaaaaggcctaaggccaggcggcgtaatgttatttaaacaattacgccttcagcggaatagtggttacgctttcacgcacataacgtggtaaataccgtcaataatttcagtcccttcagtttcgtgttcaaatccagggaaatggtggtcccaggattgcaggctgcgtaaataacttacttgcggactgtttttatcgccgaagttttcaccagacagcagcatcgggattcctggcggatacgggataacactgtttgccgcgatgcgtcctggcagattttcaatggataccagttcgacattgttgtcgacaatcgcgttgtacgcttcacgcggggtgacttccgccaccggcaggccggaataggcttcgttcaaccgtgcgccagggttgttttctttcagccaggcaaacatggtgtcacccagatcgtgaatccccatgttcgcgtaagtgtcaggatattgttcaacaagttccggcatcacctgcgccagcggtgtgttggcgtcatagtggcgtttgaaggagcaaagggtgttaaccagagttccccatttcccacgggttacgcccatagagaacaggaacataatttggaagtcagtggtgcgggtaggtacaatgccgtggcgaccaagccaggcagtgaccagcgccgccggaacaccggtttcttccagttcaccatcttcacccattcccggagcaaggatgctgactttaatcgggtcgagcatactccagttatccggaatatctttgaagccgtgccagctttcgcccggatgcattacccagcagtcctgaacggtggtcagcagtttggttggtgcgtcagcaaagtcataggttttgccggtttgtgggtcggtgacgacttctttgttccacggtttgaagaaccagctaccgtcagcggtgaactctttatatagccgcgccatcgcctgacggaaatcaaccgcttcgtcaatcacttcctgtgtcagactcaggccgctgttgccgtccatcatgctcaccgccacgtcgttggatgcgcagatggcatacagcggggaggtggtggcatgcatcatgtaggcctggttgaagcgggagaagttaatcgccccacgaccttcacgtacatgaatataagaagcctgactcagcgcattcagcagtttgtgggtggagtgggtggcgaaaacggtaggaccgttgtgatcgccaggttcgccgcgcatggcatagtgatcggcatagatcgggttgaaacgtgcatagccgtaccaggcttcgtcaaagtgcagacgatcggaggttttttccagcagatcctgcgcttctttagcgttataacacacgccgtcataggtgcagttggtcaccacgcagtaagacggtttttgcccggctttgtctttggtcagcgggctttcactgattttcttctgcaaggtttcaggttgcatttcctgcggatagattggcccgataatgccgtagcggttgcggcttggcaccatatagaccggtttcgcgcctgtcagcatcaaaccttgttcgatggatttatggcagttacggtcaacgaccacgacatcgttatcggtcatgcaagcctgcatgatggtgcggttagagccggaagtaccgacgactacgctccaggagcgatcggcaccaaatacgcgtgcggcatatttttcgctttcgccaaatgcgccagtatggtcaagcaaagaaccgagggaagttcgttcgatgcccatgtcggtgcggaacagattttcaccatagtagtcatggtagaaacgtccggcgggtgttttggtaaaaccaacgccgccctggtggcctggcgctgcccaggaatattcatggatgtcactatatttcatcagcgcgctgaacagtggcggcaacagctgctggcggtagcgggtcatcgcggcaacggcgcgtccggcgataaagtcggcggtatcttccagaatccaggcgaattcatcgacaagctccagcaggtcgcgatccattgcggcgagggctttttcccgatcgcccaacaggaagaccggcacgttttgttggcgctcatgaagcttaccgatcaattgtctgacgttttgatgttcgtccggatgttccatttgatagctgaacatcaggcagtcaatggcttcgttactagagagaatggcaaaaccatcatcaaaggaggtggatttaatcacggtaacattttgctggcttaaagcatctgccagacgctcaacggcgttaccgacccaggtgtcttgatggagaaactcgctttcaacaattaatactttcatcattgcttacccggttatgaaggaatcttcgttgcgggcaagtatcttccggccttttcgggctgtaaagcgcgtgaaaaacaaacatttttgaaatatttagttttataaacaatacgttatgtgattattttaaattattttcactgcttattatcgacggctaaactatttttttggctgatactgatatcgtctttagccgggaaacgtctggcggcgctgttggctaagtttgcggtattgttgcgggctcatgccgacatatttgccgaacgtgctgtaaaaacgactactactacgaaagcctgccgtcagggcaatatcgagaatacttttatcggtatcgctcagtaacgcgcgaacgtggttgatgcgcatcgcggtaatgtactgtttcatcgtcaattgcatgacccgctggaatatccccattgcatagttggcgttaagtttgacgtgctcagccacatcgttgatggtcagcgcctgatcatagttttcggcaataaagcccagcatctggctaacataaaattgcgcatggcggctgacgctgtttttgtgtgtgcggctggttttattgaccagaatcggttcccagccagagaggctaaatcgcttgagcatcaggccaatttcatcaatggcgagctggcgaatttgctcgttcggactgtttaattcctgctgccagcggcgcacttcaaacgggctaagttgctgtgtggccagacttttgatcaccatgccgtgagtgacgtggttaatcaggtctttatccagcggccaggagagaaacagatgcatcggcagattaaaaatcgccatgctctgacaggttccggtatctgttagttggtgcggtgtacaggcccagaacagcgtgatatgaccctgattgatattcactttttcattgttgatcaggtattccacatcgccatcgaaaggcacattcacttcgacctgaccatgccagtggctggtgggcatgatatgcggtgcgcgaaactcaatctccatccgctggtattcgctatacaggctcagcgggctgcgggtctgtttttcgtcgctgctgcacataaacgtatctgtattcatggatggctctctttcctggaatatcagaattatggcaggagtgagggaggatgactgcgagtgggagcacggttttcaccctcttcccagaggggcgaggggactctccgagtatcatgaggccgaaaactctgcttttcaggtaatttattcccataaactcagatttactgctgcttcacgcaggatctgagtttatgggaatgctcaacctggaagccggaggttttctgcagattcgcctgccatgatgaagttattcaagcaagccaggagatctgcatgatgtctgcacccaaaattacatttatcggcgctggtagcacgattttcgttaaaaatattcttggtgatgtgttccatcgcgaggcgctgaaaacggcgcatattgccctgatggacattgaccccacccgcctggaagagagccatattgtggtgcgtaagctgatggatagtgcaggggccagcggcaaaatcacctgccacacccaacagaaagaagccttagaggatgccgattttgtcgtggtggcatttcagattggcggttatgaaccttgcacggtgactgatttcgaggtctgtaagcggcatggtctggaacaaaccattgccgatacgttggggccgggcggtattatgcgcgcgctacgtaccattccgcatctgtggcaaatttgcgaggacatgacggaagtctgccccgatgccaccatgctcaactatgttaacccaatggcgatgaatacctgggcgatgtatgcccgctatccgcatatcaaacaggtcgggctgtgccatagcgtgcagggaacggcggaagagttggcgcgtgacctcaatatcgacccagctacgctgcgttaccgttgcgcaggtatcaaccatatggcgttttacctggagctggagcgcaaaaccgccgacggcagttatgtgaatctctacccggaactgctggcggcttatgaagcagggcaggcaccgaagccgaatattcatggcaatactcgctgccagaatattgtgcgctacgaaatgttcaaaaagctgggctatttcgtcacggaaagcagtgaacattttgctgagtacacaccgtggtttattaagccaggtcgtgaggatttgattgagcgttataaagtaccgctggatgagtacccgaaacgctgcgtcgagcagctggcgaactggcataaagagctggaggagtataaaaaagcctcccggattgatattaaaccgagtcgggaatatgccagcacaatcatgaacgctatctggactggcgagccgagtgtgatttacggcaacgtccgtaacgatggtttgattgataacctgccacaaggatgttgcgtggaagtagcctgtctggttgatgctaatggcattcagccgaccaaagtcggtacgctacctagccatctggccgccctgatgcaaaccaacatcaacgtacagacgctgctgaccgaagctattcttacggaaaatcgcgaccgtgtttaccacgccgcgatgatggacccgcatactgccgccgtgctgggcattgacgaaatatatgctcttgttgacgacctgattgccgcccacggcgactggctgccaggctggttgcaccgttaaaacgcgactaaacgctactgcgccgggggatttattccggcgcacacctctgacgataccaataacagaaggcgggcgttggtaacagcgacccgataccctatgagcatttcaatgactacaaaactcagttatggatttggagcgttcgggaaggattttgcgatcggcattgtgtatatgtacctcatgtattactacaccgatgtcgtcgggctgtctgtgggtttggtcggtactttgtttctggtggcgaggatctgggatgctattaacgatccgattatgggatggattgtaaatgctacgcgaagccgatggggtaagttcaaaccctggatcctgatcggtacgttggcaaactctgtaatcttatttctcctctttagtgcgcatctgtttgaaggtactactcagattgtctttgtttgcgtgacctacatcctctggggcatgacttacaccattatggatattcccttctggagcctggttccaaccatcacgctcgataaacgtgagcgcgaacaactggttccttatccgcgtttttttgccagtctggcaggctttgttacggcaggtgtgacgctaccatttgttaattatgtcggcggtggcgatcggggatttggctttcagatgttcactctggtactgatcgccttttttattgttagtaccatcatcactctgcgcaatgtgcatgaagtctttagcagtgacaatcaaccgtctgctgaaggaagccatctgacacttaaagccatcgttgcgctaatttataaaaacgatcagcttagttgcctcttgggtatggctcttgcttataatgtagccagcaacattattaccggctttgctatctattatttcagttatgttatcggtgatgcggatttgttcccctattatctgagctatgcgggagctgctaacctggtgacgttagtattcttcccacgcttagttaaaagtttatcccgacgcattttatgggccggagcatctattcttccggtgttaagctgtggtgttctcctgttaatggcattaatgagctatcacaacgtcgtcctcattgtgattgcgggtattttgctgaatgtgggaacggcgcttttctgggtattacaggtcatcatggtggcagatatcgttgattacggtgaatataaactgcacgtacgctgtgaaagtatcgcttactccgtgcagactatggtggtgaagggcggtagtgcctttgcggcttttttcattgcggttgtgttagggatgattggctatgtaccgaatgttgaacagtctacgcaagccctattaggtatgcagtttattatgattgctctaccaactctgtttttcatggtaacgctgattctctacttccgtttctatcgcctcaatggtgacacgctgcgcaggatccagatccatctgctggataaatatcgcaaagtaccgcccgagcctgttcatgctgatattccggtcggtgcagtgagtgatgtgaaagcctgacgtggacaatagctaacgaaaatggcctgatgcgatatgtttatcaggccacgtcttaatgtaatgctttggatttgcaaattttgtagaccggataaggaattcacgccgcatccggcatcaacaaagcgcaagttgttatccggttatcaagccaaagcgccgtagctggcggcaatgaaagcgagcgaggaatatcaccgtcgttaatgcgccaagcagcgcgcagaacatatcggattgcgtgtcccactggtcgccctgggtgccgagaaaatcatccgctccctgacccattgccagcgctgcccaccactcgattaattcatacatcgcgcttatcgccagcgccacgcagcagaccaggaacgccaccattttacgtccgcgcacgtacatcccgcgaacgagaatttctcgtgccaccagtgcaggcaccagcccctggaaaaagtgccccagcttgtcatacggattacgactcaaccccagccattcctgcacctcaaaaccaacggggactttcgcgtaggtgtattgtccgccgaccatcaggatgatggcgtgaaggaaaatgagcgtatagagcagcggcgttaacggataacgtctggcggtggcaagcagtagctgcacgacaataatcaccggtgtcacttccatcagccaggtgagtttgtcatgggcgctaatgccggtataaatcaggattaacgttagcgtcagtgcgctggtgttaagaattaacggcttgagtgtgcgggtcatggtgagttcgcaaatcagggaaaatactgactattcaccagcaagcgtgaaattacaatcgcaaaagaggtggccagggggatcacctggcagcatgctgccaggcgctgggccgaagaggttacttagtgcagttcgcgcactgtttgttgacgatttgctggaagaagtcgttacctttgtcatcgaccaggataaacgccgggaaatcttctacttcgattttccagatagcttccatacccagctccggataagcgacgcactccagatgcttgatgctctgctgcgccagtaccgccgccggaccgccgatgctaccgaggtagaagccgccgtgtttatgacacgcgtcggtaacctgctgactgcggttacctttcgccagcatgatcatgctgccgccgtgggattgcagcagatccacgtaggagtccatacggcctgcggtggttgggccaagactaccacttggataaccggcaggggttttcgccggacccgcgtagtagatcgggtgatctttgatgtactgcggaagttctttaccggcgtcaatcagctctttcagcttggcgtgtgcaatatctcggcccacgataatggtgccggtgaggctcaaacgagtggataccgggtattggctaagctgggcgaggatctctttcatcgggcggttaaggtcaactttcaccgcttcgccttcaccggcctggcgcagttcttgtggaatgtactggcctgggttgtgttccagtttttcgatccagataccttcgcggttgattttcgctttaatgttacggtcagcggagcaggagacgcccatgccgaccgggcaggatgcgccgtgacgtggcagacggataacgcgaatgtcgtgcgcgaagtatttaccgccaaactgcgcgccaagaccgagtttctgggcctcttccagcagttcctgttccagctggacatcgcggaacgcctgaccatgttcgttcccttccgtcggcagttcatcgtaatagtgagcgcttgctaacttgacggttttcaggttggtttccgcagacgtaccgccaatcacaaacgcgatatggtacggcgggcaggctgcagtaccgagggtacgcattttctcgacgaggaagtttttcagtttgccgggagtcagcagggctttggtttcctggtagagatacgttttgttggcagagccgccgcctttcgcaacgcaaaggaatttgtactcatcgccatctaccgcgtacaggtcgatttgcgcaggcaggttagtgccggtgttgacctctttgtacatgtccagcgccgcattctgactatagcgcaggttatcttcgatataggtgttatagacgcctttgctcagcgtttcttcatcaccgccgccggtccacacgcgctggccttttttaccgacgatgatcgcggtgccggtatcctggcaggtcggcagcacgcctttggcggcgatttcggagtttcttaagaattgcagcgccacgtacttgtcgttttcgctggcttctggatcgtgaagaatagccgcaacctgtttctggtgtgccgggcggagcataaaagaagcgtcgtgaaaggcttgctgcgccagcagggtcagggcttctggttccactttcaggatggtttcgccgtcgaagtcggcaacgctaacgtaatcggaagtgagtagatagtattcggtattgtctttccccatcgggaaaggtgcctggtagataaagggtttgttactcatagcttccagcctgtaactctgtatttgttattcgaaaatggcgtgccgcgtagtcacgggcggcacgcaaagtgcatttataagaacccgtacatcgcggcgaagatccagccgaagacgcagcttacgctcacaccaatcaaccccggcagaataaagctgtggttgatgacgaagcgaccgatgtgggtggtgccggaacggtcaaactgaatcgctgccagatcgctcggataagtcggcaggatgtaataaccgtagcaagccggtgcactagccacgatgtatgccggatcaacgccgatcgccagcgcgaccggaacaatcgccgccagcgccgcagcctgagagtttacaaacttggaaaccagcagcagaacaatggcataggcccacggatactctttcaccatttcacccagtacgccctgaatttcagacatatgcgcaccgaacatggtttctgccatccatgcgataccgtacaccgccacgatggcgatcataccggaacggaagacttcgtttttactgatagacgcgggattggttttggtcaggataataatcagcgccccggtcagcagcataaacatctgaataaccagtaccatgctcagcggtttgccgccgaaggatggacgcaggtcgctatcagcaccaagaagggcgactacagcgattgccccgaggaaaatccacattgccagccagttgcttttcggcagttttttatccagcagcgtcgcggtatcaccgtaaacatactcacggttttccggtacggagatgaatttctggaactcttcgtctttatccagatctttaccgcggaaccagctgaagataccgatcgccaggataccgattaacgtgcttggaatggtgattgccagcagatcgaggaactcaagatggcgaccatcaaaggtgacattacccagcatcgcaaccagagacacgaccgcaacgctcaccggactggcgataatccccatctgtgcaccgatagaacttgccgccatcggacgttccggacggatgttgttcttaatggcgacgtcgtagatgatcggcagaatggtgtaaaccacatgacccgtaccgcaaagaatggtcagtgtacaggtcacaaacggcgcgacaatactgacatatttcgggttgcggcgcagcagcttctcggcaatttgcagcatgacatcaagaccgccgctagcttgcaaggtcgcgcttgccgccaccaccgcaatgataaccagcatgacatcaactggtggtttacctggctgaaggtggaagacgaagaccagaatgaccagaccgataccgcctaataaacccagcgcgataccaccctttctggcaccataaaacagacatatcagtattatgataagttggatagtaaataacatgtgtgaaccctcgcgataatcctatttaaatttttgctgaatagatcacagtcacgttctgttttgtatgaactgttttcagagcctgactaaatatccgtttggtcgttaccggctttagcaaatacctcacagtgaatattggctgattaaagcagcggcaaatttatgcactgtgataagcggctttttcagagagaaagactctctggcgatgggtttatagtttgtactgcgcagatgttaatgttttgtttgctgttatcttattgatatttatcggtctattttttgttctcagggcagatgtcattaggtttatagattaatctgatctacccatttgtgggtaaaaatacacataatgcgggtgacataatagttaattaacttttgttagcgttttgaaattaaaaacaccgttcacctgaagagatattaatttttagcgatgatggagggataattatatttgatctggcacaagttttactgatgaaggatgtaacttgtgccaggggtattttgcattacggtaataattattacttacagataaccagcgatccgttattggcaatattgtttcagtagactgtagtgttctgcctgaatacggtaacggtaaactggacgccccgtgacgccataatggatactggtgaacaagatgtggcagttgaccagccagatgaggtatttacggcaggaaacacggctaatgttaacctcgttggctagctcgtcggtactaaattcatagtcctgatgcgcgtcaatccactggcacagtgtgcgtaacgtctgcggcgttaagccttttggcaagcgacgaggatcctgttcgttggagctgctgccgtggattagctgatcaagctcggcctggtcataatactgatgtttttccagcgccattttcttttgccgccagccggtgagcgcctcttcaaagcgggaagcctggaagggtttgatcaggtaatccacgacaccgtaatgcaggctatctttaatggttgccgcatcggctgcggaggagatgacaatcacatcacttttgcaacgcgcgttatgcaggacaggcagtaaatcgagcccgttctctttttgcatatagatatcgagcaatatcaggtcgataggcgtatcgctattgaagataatctctttggctttctccagcgtgctggctgttccacagcattgaaagcctgggatttgtgctacgtatcggcgattcagctccgcgaccattgcgtcgtcatcgataattaatacattgatcatctgttgctcctctccccgtcccagggtatctggacaaaaaattgtgtgaaaatcccgggttcgctttccacggcgatgctgccgccgagattttctacctgttgtttgacaagtgctaaaccgacgcctcgctcgcttccttttgtgctgacacctttgtcaaaaatgtgatcgattttatcgggtgcgatccccggtccatcatcattaacttcacagtgcagccagccgtgacggtagtgcaatgttacgctaatttcgcctccgggttccggccctaatgcctccagcgcgttttctatcagatttcccaacgtggtaatcagcgtcgcgacctggtcctcactgccgctgtctggcagctggctttcactgtttaaaatcagcgtatggcctaaatcggtcgcgcggttaatcttgctgattaaaaaaccagcgataaccggagatttgatcttacccagcagagagccaatctcttcctgatagttattggctgttttgagaatgtaatcttccaactgcttataactcttcagatgcaataatccgagaatcacatgcaatttattcataaattcgtgggatcgttcacgaagtgcgtcagcatagttgaccagaccgtcgagtcgctgcatcagtttacgtacttcagttttgtccctgaaggtactaatggcaccgatgataacgccattactgcgcaccggaacggtgttgatcagtaatagccggtctttaatcgtaatctcttcgtcgcggcgcggggtaccgtcgcgtaacacttcgctgacatctaccacctgactccaactgtggcttagcgtgctcagtttctcatcgtcctggctcttacggtaattcagcaattcttgtgcggcatcgttgatcagcgtgacctcgccgcgatcgtccacggcaacgacgccttctttgatagactgcaacatggcctggcgttgctcaaacagcgtggagatttcgtagggttccaggccgaaaaggatttttttcagtaccttaaccagaatgcaggtgccaatcagtccgaccagcatgccaaataatacgctccagataatgctccagcgactgtcattgatctgttgggtcacacggcttaactcaaggccgatcgccaccacgccaatttgtttatgattttcatcgtagatgggggtaaatacgcgtaaagcctgcgccagaaaaccgcgattgatagcgacattttcttcgccattcagcgctttaaggatgtcatcacctttaaatggctgaccaatacgctgggcttcaggatggctgtagcgaagactttgcatatcggtaacgacaataaacagcagatcgttgcgtttgcgtacggcttccgcgatggcctggatgccactctcctgcggttttttctgcaagccctgacggatttccgggctgtcggcgagggtacgcgccactgccagtgccttgttggctagcccatctcgcgtcatatcactgatttggctgaagtaaatcagatgcaccaccaatagcacgctgaacagtaccgcactgaccattaagatcactgtggtactcaatttcatcggacgtttgcgtaacatgcggtagggcaaactatgtctcatcagcttccttgtgtgacaaatttcttaagcattatctctgatgaggcgggtaattcaaagggagtaagaatgattggctatataggggaagagactctggcaacggaaactgccagtgctgtatgaagattccggggctatgcttatagcgataatcatactgatgagagagggaaggtcatggatcaggcgctactggacgggggttatcgctgttataccggcgaaaagatcgatgtctatttcaacactgcgatatgtcagcattctggcaattgcgtacgtggcaacggcaagttatttaatctcaaacgaaagccgtggatcatgccggatgaagtcgacgtcgccactgtggttaaagtgattgatacgtgcccgagcggcgcgctgaaataccgtcataaataagcgagggtaaaatggaaatacgcgaaggccacaataaattttacattaatgacaaacaaggcaagcaaatcgctgaaattgtctttgtgccgaccggagagaatttagcgattatcgaacataccgatgtcgatgaaagcctgaaagggcaagggattggtaaacagctggttgcgaaagtcgtggaaaaaatgcgtcgggaaaaacgaaaaattatcccattatgcccatttgcgaaacatgaatttgataaaacgcgggagtatgatgatattcgcagttgatgggagagtacagagtcacgatatttttcattctctccgcgatgtgatgcaggagagcatctgaagggtagggggatgcacaaagaatgggcagagagcgcgtttttttgtcccaagtcatcccctttactgagcaaaaaaaagaatatctcctatatgagaatcatcaatcggggttaataagttttgcgtccccagagcgtttaatattgataggagtcatattatggaaggtaaaaacaagttcaatacttatgttgtttcttttgattatccaagttcttattccagtgtgttcttaagattaagaagtttgatgtatgatatgaatttctcctctatcgtggctgatgaatatgggataccacgacaattgaatgaaaactccttcgcaataacgacaagcttagccgcaagtgaaatcgaagatttaatcaggctcaaatgcttagacttaccggatattgattttgacctcaacattatgacagttgatgactatttccgtcagttttacaagtaaccaggaaggataagaagaacataaaaaatggcactattctctaaaatattaattttttatgtgattggtgtgaacatatcctttgtcattatctggtttatcagtcatgagaaaacacatattcgtttacttagtgcattcctggtcggaataacctggccaatgagtctgcctgtggcattacttttttctctcttttaagagctgtagttgagtggacccgctggttatcgtgaaacgaagcgtctctcctcaaaactggatttgcggaacgatgaacgaagcagtcgcctgactgcttcgttcattaaagtgaaatttatttctgtgggcgcatcgccgggaagagaataacgtcgcgaatagtatggctgttagtaaacagcataatcattcggtcgataccaatacccagaccagcggttggcggcagaccatattccagcgcagtcacgtaatcttcgtcatagaacatggcttcgtcgtcacctgcagctttagcattaacctgttcctggaaacgttcagcctgatcttctgcgtcgtttaattcgctaaaaccattaccgatttcacgaccaccgatgaagaattcaaaacggtcggtgatttccgggttaacatcattacggcgtgccagcggggacacttctgccggatattccgtaataaaggttggctgaatcagatgtgcttctgccacttcatcaaagatctctgtgacaatacgtcccaacccccagcttttctctaccgtaataccgatagattcagctaatgctttagcagcatcaaaattatccaggtcggccatatcggtttctggacgatattttttgattgcttcgcgcatggtgagtttttcaaacggtttgccgaaatcaaacacatgctcgccataagtgactttagtggtacccagaacctcttgtgccagggtgcggaacagactctctgtcagttcaatcaaatcgtggtaatccgcatacgccatgtagagttccatcattgtgaactcaggattatggcgaacagaaataccttcattacggaagttacggttgatttcgaatacccgttcaaaaccgcctacaaccagacgtttcagatacagctccggcgcgatacgcagatacatatctaaatccagagcattatgatgggtaataaacgggcgagcagatgccccacctggaattacctgcatcatcggggtttctacttccataaagccgcgcgcgaccatgaattgacggatagcggccagaattttactacggacaacaaacgtttgacgggatttatcgttagcgatgaggtccagataacgttgacgataacggacttcctgatcctgcagaccatggaatttatctggtaaaggacgtagtgctttagtcagcaggcgcagctcagtacagtgaatggaaagctcacccgtttgcgtcttaaacagcgtaccgcgggcaccgataatgtcacccagatcccattttttaaactgatcgttataaacaccttctggcaggctatctcttgcaacgtacagttgaatacggccaccgacatcctgcaacgttacaaaggaggctttccccatgatacgacgggtcatcattcggccagcaacgctgacttcaatgtttaaggattccagttcctggttatccttcgcatcaaactcttcgtgcaactggtcagaggtatggtcgcggcgaaaatcattgggaaacgccacaccttgctgacgtagtgccgccagtttttcgcggcgatttctcagttcatcgttaaaatcaatagcctcattggctccccgtgtttcttgttcagacattttggttcctctaaatccagctttcaatttagcgtagataaagagacagatcggtacactgtattatctgcctcgactattagtaactcagtttatcttatcgaaactaacgcttacctcaagttgatatcactaataaataaccatcaaaatggtttaaatgacttattaatctcgatttgttagtgttataaactaaaagttaatttattcataaccaattgtttttacgacagttaatcgttgctctcctgtatcatattcgtcggcgtgctaaacagaaaacgggtagcaaaggccaatacgacgatgatcgcgacacaagccaacgtccactctcccatctgagaaaagaatcgctggtaagctgcaattgccataccgctaatttggctctctgtcgtctgctgtgccacgacgcctgccagccagttggcgaccgcgcctgttgccagcatataaatcccggttaatacgccagacattttcagacgcgtgatttgcgcaatcgccaccgggtcaataaagagttcggcaaagcccattagcgccagcccggatatcatcacgcccatactcgcttgaccgtcagccgctgcatgtcgggcatcaaatgccaacaacataaagccacaagccatcagcagtaagccaaaggcaaacttcagccagacgcgcaatgtactgttgccgcggctttctgggctcgccagccaggccagtacaaccccagcgagcatcaccgcaattgcattcacgctctggaatagtgctgtaggtacttcaatattgaatgcctgacgattcacaaagcgatcgataaacaagctgatggtactgccgccctgttgtgccagtacccagaacaatgtcccgacaaacatcaacaatacaatttgccaaagagcacggcgatgttcggggaatttgatcatcatgcgggcaatgatttgtgcggcaatgaggcaaacgatcgccagcaaatatccggaccagtcgttctccagcagcagagtaaaaaatactggggctaaacagagcatcaccactaaccagctccatactggtaaggcaaatttgacactagtgagcgcttttttatccatactacgtgtggactggaaatgacgatgaccgcttaagaaaatcaacaaaccgataaacatgccgccacccgcaagggcaaagccaacatgccatccataccactgagcagccaggccgcaggcgattggggctgcgatagaaccgatattgcccgcagcatacagcaggctaaaaccgccatcacgtcgatgatcgttctcgtcgtagagctcgccaagcaaacagctgatgttacttttgaataaaccgtagccacaaataatgattgccagcgccagatacaggctaaaggtactatttgtatcaatacccagcaccacatggccaagggtcattaacagcgcgccggcaatcactgcagtgcggttgccgagcaggcggtcggcaagccagccgccgagaataggggtaacgtaaaccagagaagcatatgcgctgaacaggctgatggcatggttatcatcaaaaccaagctgatgggtgagatagagaatgagtaaggcacgcatgccgtaaaaactgaagtactcccagatttggatcgccacgatatagtatatcgcgcgcggctgactgggtgttttcatgtgttctccttatgagcaaaaaagggaagtggcaagccacttcccttgtacgagctaattattttttgctttcttctttcaataccttaacggtatagcggccatcagcctgacggtatgcaccgtgaatatcggtttcaaagcccggatagtgagcgccgatttcacacagcatctgcaggaactccagaaccggacggctttcttcggtgatcatttcacccggcattaccagaggaactcccggcgggtacggaaggatcatattggcgttaatacgacctaccatttcgtcgaggtaaacttcttcggtcataccgtgcagctctttctggaatgcagcatacggagtcattaccatcgtcggcagcacttcaaatgcgcgatacatcagatccggcagattgtggtgaacaatcagtttgtggatattctgagccagttcctgaatacgcatgttttcatagaattcaggatcttcacgatacagagacggcagcatgtttttcacacgcaggttcaggtcgaacgcacgtttaaagtcagtcagagcacgcagcaggctcagtgctttggtcttatcgataccgatgctgaacaggaacagcaggttatacggaccggttttctcaacaacgatgccatgttcgtcgaggtatttcgccacgatgctggccggaataccaaagtcgctcatggtgccgtctttttccatccccggagtcagcagggtgactttgatcgggtcaagatacatgtgctcgttatcgatgtttttgaagccgtgccaggtgctgtcagaacgcagcggccagcattcagtcgtatcgatatgatccggctgccatacatcaaagaaccagccatcagattccgttctcagacgtttgatctctttacggaatttgatcgcacgttcaatagaaccgttgatcagacgcttacctgcattgcctttcatcatcgccgcagcggtttcagtggacgccacgataccgtagtgcggagaagtggtggtgtgcatcatgtaggcttcgttaaaggtttcttcgtttacgtcacctttaacgtggatcatggaagcctgagagaacgccgccagcagtttgtgagtggactgggtttcgtaaatcactttcccttctacacggccaccgctcataccgcatttaccttcgtaaatcggactgaagttggtgtaaggcacccacgcggagtcaaagtggatggatttcacatccagtgttttcttgatgaagtcggtgttgtacagcagaccatcataggtagagttggtaattacagcatgtaccggccaggttgcgtttggtgtttctttcacgcgcttagcaatggtagcgtgctggaattcactctgtgggataccaccaagaataccgtaagcgttacgggtcgggcggaaatagattggcgtaacatcgctcatcatcatcaggtgggtcaggcttttgtggcagttacggtcaatcagaatggtgctgcctgctggagcagagtacataccaacaattttgttcgcagtggaagtaccgttggtcaccatgtagctgcggtctgcgttaaagacgcgagcgatatactgttctgcttctttgtgtggaccactgtgatccagcagagaacccagttcagatacactaatggaaatatcagatttcatggtattcggaccaaagaaatcatagaacaggctacctaccgggcttttctggaatgcagtaccgcccatgtgaccaggagtacagaaagtatatttaccttcacgaacatatttaaacagtgctttagtcagcggaggcagaatagtgttgatatattcgtcagtggtctgcttgatcttattagcaatatcttcagcagcacccagcgcatattcaaagaagctaatctgtaaacgcaggtcattcaggcttacatcgagagtggaatacgtattagcgaacgcgtacaacggcaggttctcgttcattttgctaatttcttcgcacagctcgagattatatttatcccagtcaaaaataacgccgcacagacgcgcattgttttcgatcagttttaataagtcgtcacggtcgttcgggtaaacaatctggaagttcagacgttcaagcgcgcgatgaagttcacggatgggttcttctttaaaataaacccccatgtgattcaatattgcaataacgttcatagtcatatctccaggtaaaaaaggcccctcccaacacatgggacaaaatgaaaggaggagcctcggaaaatacttttaattaatgtgcgttagacgcggtgtggttatccatactgtggctctggcgctcgtgcattttgcgagcgtagaacatcaggataatcaggctgacgatgaaggtacctgccagctcgaaggagcttgcgcccatcagcgcgatgaagcagaacacgcaacccagtacagagcagatcaggctgacaaagttgcggatgttaacgccttcaaaacgaatcaggtcaacgcaagagtagaaatacggcagcatagtcagcagtactgcgataccggtcagttcaccgaacaggtcagatgctttaccaccggcagagttcatcagagtgataaggatcatcagggcagtcattttcactgcagccagcagcagaccttttttcggaataccgttgctgtcgacttcaccataaactttcgggaagttaccgtcgttagcggcacgtacacctgcctggcctaccaacatcatccaggagcccagagaagtcaggcacgcaaaggcggtgaatgcagaaaccagcggcgcagcccagttaccgaggatagtactagcactgattgcaaacggagcaccggaagccgccattacagaagacggatacataccggaaagcacctgagtcgcagcgatgtaaacaatacctgctaaaccagtacccagcatggttgccagcggaacggtacgtttcgggtttttaaccataccagtacttacagctgcggattcaacacccacgaaggcccacaggcagagcagaatacttttaatgatcgcatgaccatcagtggtatccgcagtattccagttagctgcataagttgccgcatcaaaccaatgccagccaacaatagcagtcatcaccacaggaataagaaccagcaccagaccaatagtggttaaacggcttacccaagtaccgccgagcatatttacaaaggtaaatacccagacgatagcaatacaggcgatacccgccggaacaggatcatttaatactgggaagaaggtggaaagataagatacagcggtaataccaatcgccaggttaccaatccagttagcatggtaataaagaacacctgtctgaaaaccaaatgcaggggaaatttctccggcataagcaattgggccaccttgttgcgggttttttgttgccagtcgggcatatacatacgccaggctcattgcaccaataatagagataatccaaccccagatagcaataccaccgatacttgctaggttcgcaggtaataatgcaataccgctccccatcatattaccggcaacaacaccggtacaggcaaatagcccgatcttcttggcagaactcatgctcttctcctaatttcatttttgaatttggagtccgggtcatgatgtataactatttcctgaccagaccaaactggcgataagattactcacgaaaaaaggattaatcctaaagattaggtgaaataacacaaaagtttctgtaagtgagaacttgaggttttttattaacacatcaggatcgcaagttgatatcatgaaaagataaacatttaatgtttacaatggattgcgtgacattctctggttaaatttatgtaataaaaattatgcggcaaataaattgccgcaacatattataccaacaggaacatacaaaaactcaacaacaaatatttccgagcataaatcaacccggagttacttattcactagcaagaaatttgtcgagataaggtacaacataaggaacagaagtctggaatataccattttcaatccagtaaagggtgtttgcccctgggcgtaaattaaaggcggtgagatatgcatcagctgcttcccggttcatccccttcatttcataaaccttgccaagcaacacataatttagccaggacatttcaagatcaatgccagtatttatcgcctggtaagactcatctgttttaccttttaccagagcactgaccgcttttatttgatatataatggacaggttgttcaattccggcagtgtaacaatgttatctatttctgtgttcagtgctgctaattgtttttcatctaaaggatgttgagaatggcgcacgatatcaactaatgctttttctgctctcgcgtaggtaaattctggggaactttgaacaatctcacctaataattcactggcacggttcaaacttttatcatcgccatgcagtaaataatcatgtgcctgataaaaattagttaataacgcaccacgatgcggcaaaattttctggagcgtctcctgcattcgttgtggccacggttggtttaacgctttacttaaactctccagtaaatcattttgaatcgccagctgattaccgttagtgatgacataacgtttatccagcatggtactaccatctgcattgtctaccaattttatgctcataaagcattgttgagcacggtattggcgctgattaacaaacgcaatagataatgttttaccggaactgctcggttcatcaatgttgtagttgattttgtcatgcaccataaaggtggagaaggtgttaagacttgtcgccaccaaatcacccacgcctatcgcgtaagagagctgatacggggaactccagctgttacaacttttatttaccatattaatgtcaatatcgcgtggattgagcaaaatacggcttttgctcataggaagacgtgtatcaagactactaaacgctaccagtgctacacagatacctaagctcaacaggaaaaaaaaccatacccaaaaggtagtgaatcgtttgcttttaactggggattgttcaggtggcgttgcggtgttttgaatgttaagactgtgggagggagaatctgtggcaggaaccgcctctggtatagggggagggctagatagcattatttcctctccctcttcttcgctgtaccagataaccggcaccattaatttatagccgcgctttggtacagtagcgatatagacaggactatcttcatcattatcttttaaactcttacgtagttcactgatactctgcgtcacaacgtgattggtgacaatacttctcttccagacattatcgataagttcatccctgctaagtacttcgccactgtgttgagcaaagaaaaccagaagatcgattaatctcggctcaagggtaagttgacgcccattgcggctaatttggtttatggacggagtaacaagccattcgccaacgcgaactacaggttgttgcataatagaaactcattcgaaaagggaatgatgcaatgataattgccacaacctatttttaccatctatagatgggtttatttacatattattggtgaatgcaagacgttatttttaccagccataaacttcttgattacatagtattacgaaaggattttactgagaaccagaagtaatattccttaccatcaaaattcatcatctttgccaaagaaaaatgttcagaaaataatccatggaaaattgtccggagcacttactattttaatggattgttagtctttgcatgagcaagcgaactgatacatttctctttgttctcattcagaaaatctcatcagtcgccgttcagaccggtgttgtgctttatggatgcgttacgctcctgatgacgtcatttgacgttcaacagcatcacggggccgcacgacatttcacgtcagttagtgctatagctcaggaacaaattttcccgaattgggatatgcccgcaaattgctggtgatgtggggagaatctggttgagttcggtagaattgatttggaggcagaacgcttaaatcgtggcgtcctgaaacgaaaaacggacctccgtggaggtccgtttatatgaatttggtgcccggactcggaatcgaaccaaggacacggggattttcaatcccctgctctaccgactgagctatccgggcaacggggcgcattaaaccgtaatctgcacatctcgtcaacctaatttcagtaaaagcgattcaactgcttaagattgcggcaaatcgcttcttttctgtgtttctgtcaggtcaatgcaccaccctggcggcagcgggcgaagcgcaggatatcttccgccagccgatgtgcagtgtcgacatccgcctggctacgattcaccagcattcggcttaaacagccttccagcaccagttccatctgctttgctaccatcgccggatcgtcaacttccagtgtggttaacagttcgtgggtgaaatcgtaggccgcgcttttttgctgatcggccagttgatgaatagggtggccaggatcgggataaaacgtacaggcagcgataaatagacagcccggatagcggttgtttttaacgcactcgcttaacgcctgataacgtgccagcagcttttgttcggcggtttgcgtttcgtccagcatcagctgacgacgccagacatctatctgttggctaagataacgcagcgcatcgtagaggattgcctctttgtctggccagaagcggcgtagctcgtccagtggataatccacacgttcagcaaccatctccagcgtggtgttggcaatcccttgtaattctaataatttcagggcttctcccagtacatcttcacgttgcacgctattttcctccgtctttcccactgcaagtgtcgttcacggttggcgatcgcgcaaatgtgcgctgaaggtttcagcatccataaagcccgtgacgcgtgcttgtggatgctcctggccttgtccgtcaaaaaagagaattgtcggtaggccaaggacattaagatgctttaacagcgccacatcttgtgcgtcgttggccgtgacgttggcctgaagtaagaccgtgtctgctaacgctttttgcacctgcgggtcgctgaaggtgtatttctcaaactctttacaggcgacgcaccagtcggcataaagatctaacatcaccggtttgcctttggcttcaacgagcgcctgatttaactcatctaccgttttgatttgtgtaaagttgagatgcgtctgagtttgcgcggtatgcgtcgcaccaaatgcccaatcctgaagtgggcgcacgctaaccaatgccgctgccagcagaataatttgcacaatacgcatccagccgcgtttagcctgtaggctggtgataaaggcccagccaaagaatgcgacacccagcgcgctccacaagcgtaatccccatacatcaccaatcactcgctccagcaggaagaccggcagtgcgaggatcacaaaaccaaacgcggttttgacttgttccatccacgggccgcttttcggcagcaagcggttaccaaagacggtaattagcatcagcggcaggcccatgcccaacgcatagagataaagcgtgccgccgcccagccacatgttcccgctttgggcgatatacagcagaatcgcgctaagcggtgcggtggtgcatggactacagatcagtccggcaatcgcccccataacaaacacaccgccaggactgccgccctgttggcgattgctcatcaacgtgagacgtgtttgcaggctagaggggagttgcagggtaaacaagccaaacatactcatcgccagcaaggtaaagacgatggcgaggccaatgagcacgtatgggtgctgtagcgccgcctggaactgtaaccctgcggcggcaaccaccagacccagcgccgtgtaggtcagcgccatcccctgcacataaataaaggtcagcaacaatgctctggcagtggagagccgctgtttaccacccagcacgatgccagaaatcagtgggtacattggcagcacgcatggcgtaaaggcgataccaataccgatcaacaacgcccagagcgcggaaaagggcaattgcgcggtgggctgctcttgctgcggaacagacacaggctgtggcgctgcgttgttggcgaccacttcgcttaacggaacggttttggtttctggcggataacagaaaccggcatcagcacagccctggtaggtgacagttaacgtcgctcccgcactcgcctggttgatggtgacgggaagcgtcagccgatcgcggtaaatctcgcttttgccgtaaaactcatcttcatgccagacgccttgcggcagctgcacgtcggcaattttcgcgtgttccggcgtaatgcggatctgtttacggtagaggtagtaaccgtctttgatctgccaggtcagattaaggtcatgttggttttgctgaaaatcaaaagcaaaggcttgatccgcggggacaaattgactacgtcccggcgcgtcgaataatccggcaaaaacggaagtgctgcaaagtagcaggatcagcgtaaagatgcgttgagccatgagaggtaatctgtgtctccttatgtcagcgtaaagatgcgttgagccaactgaggtaatctgtgtctccgtgtgtaacaggtaaaaccagaagttccggggtttgatatggatgatgagacttcaggcattccagcagtgcctgctggtgagatacggtagtttttaaaatcatctgcacttcgtattcttgctccagcttaccttcccagtaatagagagaggtagcgccggggatcaaggtcgcgcaggccgccagtttttccgccagcactttggcggctaaatcctgggctgtcgcttcatctggtgccgtacatagcaccacgacagacgcggtattgctacttttttcatcaagcataaacacctcgcaagaacagatggaaccgcaagagagaggtcactatacaacggacgggggaaggatgttagtcggcgggaaagaaagcggggcgtgaacgccccgcgattgatcattacagcatgaagctacccagcacgaagccgaagcaaacggccagggcaacacccagagtacccgggatgaagaacggatggttgaagacgaatttaccgatacgggtagtacccgtgtcatccatctgtaccgcagcaaccagcgtcgggtaggtcggcagaatgaacagaccagacaccgcagcgaaagaagcaacagcggtcagcggactaacgttcagtgccagagccatcggcatcagtgcttttgcggttgcagcctgagagtacagcagagcagaagcaaagaagaagatgacggccagcagccacggatgaccctgaatcacttcaccagcggtatctttgatccagtcgatgttgttggaaacgaaagtatcgcccagccacgcaacacccaggatacaaatacaggcgctcatacctgctttgaaggtgctggagttgaggatgttgtcggtatcgactttacagataacggtggtcagagttgcaacgctgagcatgatgatcaggattgcgttggtggtgttcatcagcggtttttcaaccagacccatgcttgggctgttgatgattgcatagataaccacgccaactacgcccagcaggaacagccagacggacgtttttgcaccggatttgatttcaatctgcttttcaccgcgcagttcaaccaggccctcttccagacgcttgcgataaatcggatcgtcagagagtttggagttgaacagcatagtgaccaggaaggacatcaccagaaccgccagcagggtggacgggatgaccacggagagcagatggaggtagctgatgccatgaccttccatcacggaagacatgtaaaccactgccgcactgattgggcttgcggtgatcgcaatctgcgcggataccactgcagtagacagcggacggcaaggtttaacgccttgttccttcgcaacttcagcgataactggcagtgtcgccagagagatgttgccagtaccagcaaagatagtcaggaaataggtcacgatcggtgcgaggatcgtgatgtatttcgggttacggcgcagcagcttttctgtctgatgaaccagatagtccagaccgccagcaacctgcatggcagaaatagcggcgataaccgccatgataatggagatgacatcgaacgggatgttaccgggtttaacgccaatagcggcaagaaccagcacccccaatccgcctgcaaaaccaatacctattccccccaatctggcgcccaagaagatcgccagcaaaactatgatgagttctacaactagcatattagccttccttgttttttaacaagttgatattagattgttatttttaagttactgctcacaagaaaaaaggcacgtcatctgacgtgccttttttatttgtactaccctgtacgattactgttcgctttcatcagtatagcgttttgctttgtaagccgggtgcatcagattctgtacggagaaaatatcgtcaagttccgcttcagtcaacagaccgcgttccagaacgacttcacgtacactcttaccggtttcggcacagattttacccacgatgtcaccgttgtggtgaccgatgaacgggttcaggtaagtaacgataccgatagagttgtaaacgtaaccttcgcacacttctttgttagcagtgatgccgttaatgcatttttccagcaggttgtagcaagcgttggtcagaatgtgaacggattcgaacatggcctggccaatgaccggctccataacgttcaactgcagctgacctgcttctgctgccatggtaacagtggtgtcgttaccgatgactttgaagcatacctggttaaccacttccggaacaaccgggtttactttagctggcatgatggaagagcccgcctgcagttccggcaggttgatctcgttcaggccggcacgtgggccactagagagcaagcgcaggtcgttacagattttggacatcttcacagccaggcgtttcagcgcgccgtgaaccataacataagcgccgcagtcagaggtcgcttcgatcaggtcttcagccggtacgcatgggaagccagtaacttcagccagttttttcactgccagcggagagtactctttcggcgtgttcagaccagtaccgattgctgttgcaccaaggttaacttccagcagcagttcagcggtacgttggatgtttttcacttcttctttcagcaggatgctgaaagcgcggaattcctgaccgagggtcatcggtactgcgtcctgcagctgggtacgacccattttcaggatgtcctggaattcgacagctttacgttcaaagccttcacgcagttggttaatcgcatctaccagcttaatcagggaagagtaaactgcgatacggaaaccggtcgggtaggcgtcgttagtggactgacatttgttaacatggtcgttcgggttcaggtactgatattcacctttttggtgacccatcagttccagaccgatattggccagcacttcgttggtgttcatgtttacggaagtacctgcgccgccctggtagacgtctaccgggaactgatccatgcattttccgttgttcaggacttcatcacatgcggcaatgatggcattcgctacacttttaggaatggtttgcagctctttgtttgccatagctgcggcttttttaaccattaccataccgcgaacaaattcaggaatatcactgattttgttgttgctgatatagaagttttcaatcgctctcagagtgtgaacaccatagtaggcatcagctggaacttccctggtacccaacagatcttcttcgatacgaatgttgttactcatgtgaaccttctttttcaagctgccaatgatttgctttaaacacacagaatatatgtggtttcgaatgtttttcgaccgacgattatcccctgcatcgaccgaatacccgagatcatatgctgcttgaggatttctaccgtaatctggatcactttaagtgtcggtttttaccccttaattattaatttgtgaaatagatcaccgctttgggattactaccaaaaatagttgcgcaaacatcttgaaattttgctaatgaccacaatataagctaaacgcgattcgcaacccattcaggtagccggggttaaccggctgctattacaggagaaacctttgcgctggttaccttttattgccattttcctttatgtctatattgagattagtatctttattcaggttgcccatgtattgggggtattgctgaccctcgtgctggttatattcacgagtgttatcggtatgagtctggtacgtaaccagggctttaagaatttcgtgctgatgcagcaaaaaatggcggcgggtgaaaacccagcggcggagatgattaaaagtgttagcctgatcattgctggtttgctgcttttattaccgggcttttttaccgacttcctcggtcttctacttttattgccgccggtgcaaaagcatctgacagtgaagttgatgccgcatttgcgcttttctcgcatgcctggcggcggttttagcgccgggaccggtggcggtaatacttttgatggtgagtaccagcgaaaggatgatgagcgcgaccgccttgatcataaagacgatcgccaggattaatgtcgaaacgccggattatgtggttatgccattttccggcgtttttcgttttggcagcaacagccataaccccgccagcatgatcagcgcatagagacttttccagccgaccattgccagtaacagaacgcataacagcccgccaaccaccgccagtagtcgataacgtccttgcaataatttacagcctgccagcatgcataacagataaatcataataaagatgccattggcataaataataagagcgtccagattgatctctaaagcatgaatcaccaaagtgctcaccacacagcagccgagcaccgcattgagggcattattcgggatatggcgagaagagaggcgtgccaggtagtggtcaggattatgttgcgcctggctccagaccaggcgggcgaagctctgtatataaatgttgagactggcaaagcaggccagatagccaatcacgcaggcaatccataacgctcctacaccgaacaactgcactacaatttttggaaggcttgctgccgccgccattttttcaccataggcgtcgaagtgtaagacgactaccgtacagccccagtagactaatcctgccagcagcagaccaatcatcaaagcacgaggaaaatcacgctctggatttttaaattcgctggcgagatgggcaaatgcctccagaccgacaaaacaccagaacatcacacttaacgcagcaaataacccggtaagttcgatattaccaggtgccggaaaggggatattcgcaggtttgatatcgcccgcccaccagatagcgacaatcagcgcgacgataagtccggcaataacggtttgtagattagcactggaactggcaccgcgagtaccgatataccacaccagcgccagcgtaccgagttctgccaacaacagttgccagctatgccagccaaacatcgcctggccgaacccggcggcaatttgtagtgcggcaggcaaacccacgggaatgacgcttaaaaacagccagccggtgactcgctcaagccggctaccaaacgccataccgacgaagtgcgcgacgccgcctgcgctgggatagtggcgacccagaatcgcaaacacaatcgcaatcgggaacactaagataatcaaaacgggccacgcccacaggctgttattgcccgctaccagcgcagctaacgcaggaacggcaaacacgccagtgcctaataaactcgtgcttagcaggccaatgccctgggccagccccagttcttgtttgagtccactcatgggttgatgtccgattgcgcccaaattttgggcaactgcgtagattttcgatggtagcacaatcagattcgcttatgacggcgatgaagaaattgcgatgaaatgtgaggtgaatcagggttttcacccgattttgtgctgatcagaattttttttctttttcccccttgaaggggcgaagcctcatccccatttctctggtcaccagccgggaaaccacgtaagctccggcgtcacccataacagatacggactttctcaaaggagagttatcaatgaatattcgtccattgcatgatcgcgtgatcgtcaagcgtaaagaagttgaaactaaatctgctggcggcatcgttctgaccggctctgcagcggctaaatccacccgcggcgaagtgctggctgtcggcaatggccgtatccttgaaaatggcgaagtgaagccgctggatgtgaaagttggcgacatcgttattttcaacgatggctacggtgtgaaatctgagaagatcgacaatgaagaagtgttgatcatgtccgaaagcgacattctggcaattgttgaagcgtaatccgcgcacgacactgaacatacgaatttaaggaataaagataatggcagctaaagacgtaaaattcggtaacgacgctcgtgtgaaaatgctgcgcggcgtaaacgtactggcagatgcagtgaaagttaccctcggtccaaaaggccgtaacgtagttctggataaatctttcggtgcaccgaccatcaccaaagatggtgtttccgttgctcgtgaaatcgaactggaagacaagttcgaaaatatgggtgcgcagatggtgaaagaagttgcctctaaagcaaacgacgctgcaggcgacggtaccaccactgcaaccgtactggctcaggctatcatcactgaaggtctgaaagctgttgctgcgggcatgaacccgatggacctgaaacgtggtatcgacaaagcggttaccgctgcagttgaagaactgaaagcgctgtccgtaccatgctctgactctaaagcgattgctcaggttggtaccatctccgctaactccgacgaaaccgtaggtaaactgatcgctgaagcgatggacaaagtcggtaaagaaggcgttatcaccgttgaagacggtaccggtctgcaggacgaactggacgtggttgaaggtatgcagttcgaccgtggctacctgtctccttacttcatcaacaagccggaaactggcgcagtagaactggaaagcccgttcatcctgctggctgacaagaaaatctccaacatccgcgaaatgctgccggttctggaagctgttgccaaagcaggcaaaccgctgctgatcatcgctgaagatgtagaaggcgaagcgctggcaactctggttgttaacaccatgcgtggcatcgtgaaagtcgctgcggttaaagcaccgggcttcggcgatcgtcgtaaagctatgctgcaggatatcgcaaccctgactggcggtaccgtgatctctgaagagatcggtatggagctggaaaaagcaaccctggaagacctgggtcaggctaaacgtgttgtgatcaacaaagacaccaccactatcatcgatggcgtgggtgaagaagctgcaatccagggccgtgttgctcagatccgtcagcagattgaagaagcaacttctgactacgaccgtgaaaaactgcaggaacgcgtagcgaaactggcaggcggcgttgcagttatcaaagtgggtgctgctaccgaagttgaaatgaaagagaaaaaagcacgcgttgaagatgccctgcacgcgacccgtgctgcggtagaagaaggcgtggttgctggtggtggtgttgcgctgatccgcgtagcgtctaaactggctgacctgcgtggtcagaacgaagaccagaacgtgggtatcaaagttgcactgcgtgcaatggaagctccgctgcgtcagatcgtattgaactgcggcgaagaaccgtctgttgttgctaacaccgttaaaggcggcgacggcaactacggttacaacgcagcaaccgaagaatacggcaacatgatcgacatgggtatcctggatccaaccaaagtaactcgttctgctctgcagtacgcagcttctgtggctggcctgatgatcaccaccgaatgcatggttaccgacctgccgaaaaacgatgcagctgacttaggcgctgctggcggtatgggcggcatgggtggcatgggcggcatgatgtaattgccctgcacctcgcagaaataaacaaacccccgggcagaaatgtctgggggtttttcttttggtcatctttctagtataagattcagacacggacgacgcgagtggcgtccagctcattgattatggggaataacatgcacgtaaaatacttagcagggattgtcggtgccgcgctactgatggcgggttgtagctccagcaacgaattgagtgctgccggtcagagtgtacgcattgtggacgagcagccaggcgcagagtgccagctgattggtactgcgacaggtaagcaaagcaactggctttccgggcaacacggagaagaaggcggttctatgcgcggcgcagcaaacgatctgcgcaaccaggcggctgcaatgggcggtaacgtgatttatggcatcagtagcccgagccagggaatgttgtccagttttgtcccgacggatagccagattatcggtcaggtttataagtgcccgaactgatgtgatccagaggctgggtgacaaacgtataattgcctgatgcgcttcgcttatcaggcctacataaggcattgcaactgattgaatgcttgagaatttgtaggccggataaggcgtttacgccgcatccggcatgaccaacgatcacgttatcagtcatttcaggctggatggctccagcctcgcattagcaaagatgagattatttcgcctgtggtgcagttttgctggtggattgaacacgtaagtgatgcagcgcgcgtaagcattgatcctgggttagcggttgggcgttattcgccgctacggtgcgaacatagacctgacatggcacacccgcgagttttttcagtcgtgggctgaaatcaagcattcggcgagtgatcgcttctatttctttacccggcgttgcttcacgcgttttcaccactgcgccgctaaattgttctttgccactttcatctttaaagcggtaaagcaccgccagataatggtcgaacaagttatgtttccattccggttgggaataggtgtcatattccagattgccattgtcctggcagtcaacgtcgtataacggcaggaaatctaacagactggtaatacgtaatgccagttcacgcatttccgcattattaattgcatgaatgattgctcgcgccagcatttcaatctgcaactcattgacgactaactcacatttgctaccgtcatgtagcgttaatacgaaggtaagattttcgccttgattatcggtaagttccagcgtgttaacccgacgattaatatcggcatttttaagctcatcaaccagaatttctgggatgttttctgccattttcttaatgactttatcgcgagcttgctcatactgaaggtgtgcagcagcatccagtttatgcttttgatgcagacgactttccagcgcaatcagcaggtcgcgcagttccatgacagacataaagaacaagctttctttattgcgaggttctttaattttcagcgccagtgcaatgaaattattactcttgcgaataacaccggtattaacacccttgatgcttatggccatgtaggttctccctaaccatttctcaattaaataattaattttaatttataagccagataaatgggcttggtagtaatagttgttaaaataacataaatagccgtactcactctatataaacagaaaagaaaggttaattattggtgttagctatataaaaagtaacaacagcaatgcatatgaataattaaaggttatgcaacgggcaaagattaaacttcccagtttaatgacaggttgctgtacttgcgtttgttgctcttgccggatgcagcgtaaacgccttatccggcctacagttcattgcaaatccattcaatttcaatgcacgatgtaggcctgataagcgtagcgaatcaggcaattttaatgtttaacttccctgtttaatcagttactgctggcgtagctggagatccagcggcgttttgctgggttcgccgccaatttctcgcgccagtttcggcaccagatatccgctcaccagtgtcagcaactcacgcataatctgccgtgcttcgtcatcactcaccataaaatgcgccgcgccctgtactttatcgagcacatgcaggtaatacggcattacgccggcatcgaacaacgcattactcaggtttgccagcgtttgtgcgttatcgttcacatcacgtaacagaacgctctggttcagcaaagtaacgcctacccggcgcaacttagccatcgcctgacggaatgtttcatctacctcattggcatggttgatgtgattcaccagcaagatttgcagcgtagaacgggcaaagcattcaaccagcgcctcggtgatacgtgccgggatcacaatcggcagacggctgtgaatccgcagacgttttatatgcgggatggcttccagttgtgtgagcaaccagtccagctcgtgatctttcgccatcagcggatcgccgccggagaaaatcatctcgtccagttccggatgcgcagcaacatactcaagtgcagtttgccagttacgcttgttgccctgattttcggcataggggaagtgacgacggaagcaatagcggcaatttaccgcgcagccgcctttgaccagcaaaagcgcccggttgtggtatttatgcaacaaaccaggcactacgctgtgctgttcttccagtgggtcggtggagaatccgggcgcgatgacaaactcatcttggctggtaagtacctgacgcaaaagaggatcgtccggattgcctttctccatgcgatcgataaaactgcggggcacacgcagggcaaaaagctttttggcgctgcgtccggctaacagtttttcctccgcgtctatattcaaaagacgcagaagttcatcaggatcggtcacaacatcggcaagttgcgttaaccaatcttctctggatggggtatttagggttacaatatgcgccattttgtggcttagctaccaattaacaaatttcagagggccttatggcaacgtactatagcaacgattttcgtgctggtcttaaaatcatgttagacggcgaaccttacgcggttgaagcgagtgaattcgtaaaaccgggtaaaggccaggcatttgctcgcgttaaactgcgtcgtctgctgaccggtactcgcgtagaaaaaaccttcaaatctactgattccgctgaaggcgctgatgttgtcgatatgaacctgacttacctgtacaacgacggtgagttctggcacttcatgaacaacgaaactttcgagcagctgtctgctgatgcaaaagcaattggtgacaacgctaaatggctgctggatcaggcagagtgtatcgtaactctgtggaatggtcagccgatctccgttactccgccgaacttcgttgaactggaaatcgttgataccgatccgggcctgaaaggtgataccgcaggtactggtggcaaaccggctaccctgtctactggcgctgtggttaaagttccgctgtttgtacaaatcggcgaagtcatcaaagtggatacccgctctggtgaatacgtctctcgcgtgaagtaatgcggttgtggtgcggcctgcaggctgcaccatcacttattcaggtcagagatgatgaaacgccttatcgttcttgttttgcttgccagcacgctgctcacgggctgtaacaccgctcgcggtttcggcgaagacatcaaacatctcggcaactccatctctcgcgctgccagctaatttttcttctcttccgaaaaatcatcagattcccatcatttttggcgatgttgtctattattaatttgctataggcaaacataaataacattacctaaaaggaagacgttatggtgaagaagacaattgcagcgatcttttctgttctggtgcttagtacagtattaactgcctgcaacaccacgcgtggcgttggtgaagacatttctgatggcggtaacgcgatttctggcgcagcaacgaaagcgcagcaataagcaataacggtacgacagctgtgtcgtgccgtttgttttttctgcgatagtcacaaaggtaatagttgaaattcccctgccacctggcaaaatatccgttcaaccatcagctttgcaggacgacctgcaaacgcctcttttcaccggggacggccccaattctccggagcctgatatgtcctggattatcttagttattgctggtctgctggaagtggtatgggccgttggcctgaaatatacccacggctttagtcgtttgacgccgagtgttattactgtgacggcgatgattgtcagtatggcgctacttgcctgggcgatgaaaagcttaccagtagggacggcttatgccgtgtggacgggtattggcgcagtcggcgcggccataaccggcattgtgctgctcggtgagtccgctaacccgatgcgcctggcgagtctggcgttaatcgtattggggattattggtctgaaactcagcactcattaactaccaggctgctgtacccaaataaatttactgacatcaaacccttcccgggtcgcgactgccagcatctcctgtttcacttcgtcagaaatggttggcgtgcgggagagtatccacaggtagtcgcggtccgggccgcaaaccagcgcatggcggtattcccgatcgagtgcaataacgttataaccgccatagaaaggaccaaagaaactcactttcagcgcagcgcgagttggtgcgccggtaaagtacgctttcccttcactctgctgccacattcctctgtcagggttatagcctttattaatgacattcaggccgccgtcatcacgcaggctgtatgttgcggtgactttttccagtccacgttcaaagcggtgatcaaaacgggcaatctcataccaggtaccgagataacgtttggcgtcgaaattatttactacggtcacgccacgcggcggcgtaggagaactgcaggcaacgaccagaaatgcagctgtcgctgcggcaacgagagggagcaggcgcataaatgtttccttactggtttttttctaagtgtagatgacagcaaggaaaagcggagaaaaggtccgaaaattcggacccgatggaattttactgtagagcgttaagaatctgccaggcggcgtcgactctcgctggattgggatagtttttgtttgccagcatcacgatacccagctctttttctggaataaacgcgacatagctaccaaatccgccggtcgcccctgttttatgtacccaacttgcgcgtactgcaggagttgggggcgtaatcgcttttacggggcgtgctgccagtgcaattttattgtcactgccgttaatgatgctgtcaggatttaccggccagtccagcatttcccagcccaggccctgatacatatcgccggtttgccagtagcgagattgtgccagttgtatcccttgttgaagcgttttctcattgatatcaaggggttttaaattgctttgcacccagcgggccatatcttcaatggtgctcttcacaccataagcttcagcatctaacgccccagggctaacatgcactgccttaccttcgcgatatccccaggcgtaattcttttcttctgcgggcggtacattaatccacgtatggttgagtttgagtggctggaagacacgagtttgcatcgcctgctcaaaactcaaaccagacggcttcacagccagtgcgccgaacaaaccgatactggagttggcatacagacgttgtgttcctggagcccatgcaggctgccagttttgatagaagcgcagcaagtcgctactggatttcacctcatccggcacctgcaatggcaggccgccagcagtgtaggttgcgagatgtaatagtgtgatcccattccactgtttagcggtaagttcaggccagtattttgttgtgggatcgcttaacttgatttcccctcgagcaatagcgtcgccaccaagcacgccagtaaatgttttgctgacgctacctaactcaaacaacgtttgctgtgtgacgggctgctttttggcgatgtccgcatagccccaggtaaagtaataaggtttaccctgataaattaccgccaccgccatacccgggatcttttgttgctctataagcggggtaattgtgcgatgcacaatatcgttgatttgttgaggggcagcaaatgtggagcaagaggcggtaattaataaggcgcagagcgtcgttttgaacatagggtctggtttccatacaaaacggcccgccataggcgggccggatttacattggcgatgcgttagattgtaacgacaccaatcagcgtgacaactgtcaggatagcagccagaccgtagaaaacccatttgcccgcaggtacgtggattttcagatcgtgcatcgcgtggtgcatacggtgtaaaccacaccacagcggcagaacgatcatcaggaacaggaatacgcgaccaatgaagctctgcgcgaacgccagaacgcgctcgtagctcagcgcatcacccggaaacaaccccagtggcagcagaatacccaccagcaggatcatcaccggcgcaatgatggcgctccacataccaccggccccgaagaggccccagaataccggttcgtcagaacgctttggatttggattaatcatctcaggctccttaccagtacagggcaacaaacaggattacgatggtggcaaccacagttaccgcccagagacttttgataattggctctggtcccattttttcgtcttttacaatgatattggccgctttcggtgccagttcaaaccaggttttggtgtgcagcagagctgccgccagagtgatcaggttaatgatcacgataaccgggttttgtaaaaagtcgacgaatcccgcccaggcttccgggccatttttcagggcaaacagcccgaaaatcagttcaatgctgaaccacacagccggaaccgccgtgccttcgcgcagcatgtaaaagcgataaaacggcaattttttccaccaggtggacgtcattggccgtacatacggtttacgtttagtcgtcatgttgcactccttagcgtggtttcagggtcgcgataagaaagtctttgctactttctactttgccctgctgaatggccgcagccggatcgacgtgtttcgggcagacttcggagcagtagcccacgaaagtacagctccatacgccgttctggctgttcaactgcgccatacgctccttcttaccgtggtcgcggctatcttcgttataacgatgcgccagcgtaatggcagccggaccgatgaactctgggttcaggccaaactgcgggcacgcggcgtagcacaaaccacagttgatgcaaccggagaactggtgatacttcgccatctgcgccggggtctggatgttagtaccctgatccgcggtgcgggagttgccgatgatgtacggtttgatcgcttccagactttcgatgaagtgggtcatatcgaccaccagatcgcgttcaatcgggaagttagctaacgcttcaaccttcataccgtcggtgtaatcacgcaggaaggttttacatgccagttttggcacgttgttaaccatcatgccgcaggaaccacaaatcgccatacggcaggaccagcggtagctcaggtccggtgccaggttgtctttgatgtagcccagcgcatccagtaaactggtagttgcgtcataaggcacttcatagaatgcgctatgcggtgcggtatcgacttccgggttatagcgcaccacctcaattttcaggtttttcatctcagccattcgccttctccttcttattggctgcttccgccttatcggctgcatccgcttcgccaccgtaaacgcgtttagctggcggcagcgtagtaatcttcacgtcgctgtactccaggcgagtcgtgccatcagcatcgcggaaggcgagggtgtgtttgaggaagttgacgtcgtcacgctcggtgcaaccttcgtccagacgctggtgcgcgccgcgggactctttacgtgccattgcggagtgcgccatacattcagcaacgttcagaccgtggcccagttcaatggtgtagagcaggtcggtgttgaacacgctggaagtgtcggtgatgcgcacgcgcttgaagcgttcctgcagctctgccagcttgtcgatggttttctgcatcagttccggcgtacggtagataccgcagccttcttccatagccaggcccatttcgtcgcggatcttcgcccagttttcgccgccatcctggttaaccagatctttcagacgttgttcaacgccagctgcctgcgcttcaattgccgcttcgttgccattaccggcagttgctgcacgctctgtcgcttgttcaccggccagacggccgaagaccaccagttccgccagggagttagaacccagacggtttgcaccgtgcagaccaacagaggaacattcacccacggcgaacagacctttaatgcgggtttcacagttctgatcggtttcgataccgcccatggtgtagtgtgcggtcggacgtaccggaatcggttctttaaccggatcgacgccaacgtacgctttcgccagttcgcagatgaacggcagacgttcatgcagttttttctcgccgaggtgacgcaagtcgagataaaccacatcgccacgcggcgtggagatggtgttgcctttacgccattcgtgccagaaggcctgagagactttgtcgcgtggacccagttccatatatttgtttttcggctcgcccagcggagtttccgggcccatgccgtaatcttgcagataacggtagccatttttgttgaccagaataccgccttcaccgcggcaaccttcggtcatcaggataccggaacctggcagaccggttgggtgatactgaacgaattccatgtcacgcagcggaacgccgtggcttagcgccatacccataccgtcaccggtaacgatgccgccgttggtgttgtaacgataaacgcgacccgcaccgccagtagccataacgaccgcgttagcacggatctgcaccagcgtgccttccatcatgttcattgctaccaggccgcgaacatgaccatcatcaaccagaatatccagcacgaaatgttcgtcaaaacgctggatctgcgggaattgcagagaggtctggaacagcgtgtgcagcatatggaagccggtcttatcggcggcgaaccaggtgcgctcgattttcatgccgccgaagcgacgtacgttgacgctaccatccgggcgacggctccatgggcatccccacagttccagttgggtcatttcggttgggcagtggtggacgaaataatccacgacatcctgctcacacaaccagtcgccacccgctactgtatcgtgaaagtgatattcgaagctgtcatgatcctgcgcgacagcggcggagcccccttctgcagcaacggtatggctacgcatcgggtatactttactgattagtgcgatttttgcattcggatttgcctgcgcggcagcaattgcagcacgtaatcccgcgccaccggcgcctacaatggcaagatcggcttgaaaggtttgcacgacattcctccagattgtttttatcccacagccacgtacttcagggtaagtacctgaaagttacggtctgcgaacgctattccactgctcctttataggtacaacagtatagtctgatggataagtctgaaatttgacgagatcgatttttttagtgcgcaagagggctaaattatcactgaagatgattaatttaattactaaaccatcagatcgtgctttttttagtcactgcccaccgctgtttgattcctgcgtaaaatttgtctcgccgtcgcgttgcgagtagacttcgtgcccttgtcaaaaactggagatttaactatgagcgaaacggcatcctggcagccgagcgcatccattcctaacttattaaaacgcgcggcgattatggcggagatccgtcgtttctttgccgatcgtggagtgctggaggtggagacgccttgtatgagccaggcgacggtaaccgatattcatttggtcccgtttgagacacgtttcgttggccccgggcatagccaggggatgaatctctggttaatgaccagcccggaataccatatgaaacgcctgctggttgccggttgtgggccggtattccagctgtgccgcagcttccgtaatgaagagatggggcgttatcacaaccctgagttcactatgctggagtggtatcgaccgcactatgatatgtaccggttgatgaacgaggtggacgatctcttacaacaggtgctggactgcccggcagcagaaagcctttcttatcaacaagctttcttgcgttatctggaaattgacccgctctctgccgacaaaacgcaactgcgggaagtcgcagcgaaactggatttgagcaatgttgctgataccgaagaagaccgcgacacgctgctacaattgctgtttacctttggcgtagagccaaatattggcaaagaaaaaccgacctttgtgtaccactttccagccagccaggcaagtctggcgcaaatcagtaccgaagatcatcgggtcgctgaacgctttgaggtttattataaaggtattgagctggcgaatggtttccatgaattgacggatgcccgtgagcagcaacaacgctttgaacaagataaccgtaagcgcgcggcgcgcggtttgccgcagcaccccattgaccagaatctgattgaagccttgaaagtcggtatgcctgactgttccggcgtggcattaggtgttgatcgtctggtgatgttggcgctgggcgcggagacactggctgaagtcatcgcctttagcgttgaccgggcataattctgaaaaattactgaattaacagcgaagaatggcgtgataagcgccattctgtagcatatgttttcatttttccgttaaaggccacaatttaagactggatatttgatatcatccaggtatcaattctgtattggtttttacgctgcctgctcaatgttgcgcagtgcagttcagtgggcacgtgttatacacgcgctgaaatgaaggatggtttcatgcctcacacgataaaaaagatgagtctgataggactcatattgatgatctttacttccgtatttggatttgccaatagcccaagcgcttattacttaatgggttatagtgcgattcccttttatatattttctgcattgttattctttattccattcgccttaatgatggctgaaatgggagctgcttatcgcaaagaagaaggcggtatctattcctggatgaataatagtgtcggaccacgttttgccttcattggtacgtttatgtggttttcctcttatatcatctggatggtgagtacctccgcgaaagtttgggtaccgttcagtacattcctctatggtagcgacatgacccagcactggcgtattgccggactggagcctacgcaggtggttggtctgctggctgtggcatggatgattctggtcaccgtcgttgcttctaaggggattaataaaattgcccgcattactgcggtgggcggtattgcagtaatgtgtctgaatttagtattgctgttagtaagcattactattttgttattaaatggtgggcatttcgcgcaggatattaatttccttgcaagtccgaacccgggttatcagtccggtctggcaatgctaagctttgtggtatttgccatttttgcctatggcggaattgaagcggttggtggtctggtcgataaaacggaaaatccagaaaagaactttgccaaaggtattgtttttgccgctattgttattagtatcggttatagcctggcaatatttttatggggcgtcagcacaaactggcagcaggtattaagtaatggttccgttaacctcggcaatattacctatgtgctgatgaagagccttgggatgacgctgggtaatgcactgcatttgagtcctgaagcgagtttgagcctgggcgtatggtttgcgcgtattactggacttagcatgttcctcgcctataccggtgcgttctttacgctttgctatagtccgttgaaagccatcatccaggggacgccgaaagcattgtggccggaaccgatgacgcgcctgaatgcgatggggatgccgtctatcgccatgtggatgcagtgcgggttggttactgtcttcatcctgctggttagctttggtggcggtaccgcaagcgcgttctttaacaagctgacgctgatggcgaacgtgtctatgacgcttccttacctgttcctcgcgctggctttcccgttctttaaagcacgtcaggatctcgacagaccgtttgtgattttcaaaacgcatttgagcgcaatgattgcgacagtggttgtcgtactggtggtgacatttgcgaacgtcttcaccatcattcaacctgtggttgaagccggagactgggacagcacattgtggatgattggcggccctgtcttcttcagcctgttagcgatggcgatttaccagaactattgcagcagagtggcaaaaaatccgcagtgggcggtggaataacccgatgccctatcgtctacctgacgatagggcgtaaagacaggaaatgttatggatgacaccagccgggacccggcaataaccgaagatgaaatcagggcgctgcaattttctgccggggatgtagcggaaatagagcagacgattctctcttttgtcgatgcctgccacacccgtaaagtggcgatggtggtgggtagcaccattaacaccctcaaagatcgcgatggtaaacggtggggaaacctgccggatatttattgcgcttatcttatccgatgtctggtttttcgcggggaattagtgggatacggcgatttgtttcgtatgcgctatagcgaaattaagcgaccggttaccttatgagtgcgcgcatgtttgtcttatgctgcatctggtttattgtggcgttcctctggataaccatcacttccgcgctggacaaagagtggatgattgatggacgcgggattaacaacgtctgcgatgtgttgatgtatctcgaagaagacgatacccgtgatgttggtgtgataatgacgttaccgctctttttcccttttctctggttcgctttgtggcgaaaaaaacgcggctggtttatgtacgccaccgcgctggctattttcggctactggctgtggcagttttttctgcgctatcagttttgtttgtgagccggattggttcatccggcacacaaacttacaaacttcccgcctgacgacctttgcccgcagacgtcagcgttctccccgtttgtttaccgttgaggctttccagacgcatctggaagggcgggaatggcatatcgataccgtgggcatggaagccagccagaatcagctggtggatctcatggcgtagcggcatacggtgacccatctcagcggcgtaaatacgcagctcgaaaatctgaatcccctgttgcagatccaccaggaagacttccggtgccgggttgtcgatcaccaggctgcagcgacgcgctgcggtgagcaggatttccgtcacttcttcgctattggcatcggcaggggccggtatcgtcaacaccacgcgcgtgacgctgtcagagaggctccagttgataaactgctcggtaataaacgccttgttcggcacgattatctctttacggtcccagtcgctgatggtggtggcgcgggtgttaattttcgtcacgctaccggtgagatcgcgaattgtcaccgtatcgccaatgcgaatcggtttttcgaacaggataatcagaccagagataaagttggcgaaaatttcctgcaaaccaaaaccgagaccaacaccgagcgcggcaaccagccactgcaatttgctccactcaataccaatcatactgaagccgaccagcccgccaatcagcatcagcagatatttggtgatggtggtgatggcgtaacccgtacccggcgttaaatccaggtgctgcaaaatcgccagttccagcagcgcgggcaagttgcgcaccagctgcgtggtgatgataaacaccagaatggcaatcagcaccgcaccgagggtaattggctccagactttctacgccctgtaccgtggaggtgacatcccacaggctaatattttcgaggaagccgaaagcggaatggatttcactccacagcacaatgacagaaagcagggcgatcaacatcaaaatactgcgcaccagccgcaaggattgcgcactgatggcatcgagatcgacttcgctttcatcgacttcaattgctccttccgggctactgtgatgatgcgcttcctcttcgccacgcgcacgttgcgctaacatctctgcccggcgatgcttcgcccgatcaaacgccagcctgcggcgctggatcagcatccagcggcggataacgtgataaaccaccagtagcaggaaccagatggcaacgctggtttcaagcctcgctaacagcgcctgtgccgttgccagataacccaccgcgctcgccagaatggcaaccaacggcgcgccaatcatcatgttccacagcatatggttggtaatgttgtcgccgctgccctctttgttgagatacagcggaatcccggcctttttcaggctgagggtgaccaccgccagcgcaccgcaaatgaggataaagcaaagccgtcccaggctaccggagaattcacggtcgtcgaggttatcgaacatcatcagcgccataatcagcggcacaataagcccgatgctcatcaggtagtagcgcatcccacgggaaacacgttcgcgcggccagccaaaatgagcgataaacaagccgttcgggcgggcaaaggtggcgcaaatcatcactacccacagcagcggcacggtggccgttacaccatcgccaatcgcgaccgccagcggataaggccacgcctcgcgcaagccgtaacccagcgtcatccacagcaccggtaacggactcgcgacgagaatgctccagaaaagagtgcgcaacgtcagccagaagtgatcctgagtcactttgccaactttcgccgcgctacgttcaagaaaacgggtgaaatagcggcggctgtaaatactgcaaccgaccagaatcaacgcgccaaacagcggcaaaattgtctctttgctggtcagcatcatcacactggctttgcccaactgactgaaggtgtccaggctaatgagacgacgcagatcctgggcgatttccagcggccaggcgatggtcatcgggcgcacgtcagaggtccagaacagatagcggtgcgttgcttcgttcacctctttcagcgcatcctccagttgcccgttggagactttcagcttggtcagttccaatagtagcgtgtcgccaccctgcaacaaactgttcagcaactcacgctgagtgcgcagttgtgcttccagaatacggttttgctcggcagtcagcggctgaccgtcggcctgatgaatttgccgtagcagcggctgtttattaagcagatcctcataacgtaaccgttgcacacgcaactgcgccatttcggtatcaagctgttgtggtttcggcatttccggcagccgtgccacctgcgcccgcagcgcttcgccgagcagattggagcttcccagccattggctctgttcacgcagcgtattcaacgcctgccggacctgtaacgtctggctggcagcctgacgctgttggctggcaacgagatccatccgctgcgcctgttgattcaaagccgcgcttagttcgcggttaattttgaattgcgcgacgatatctttcggcaaatcggcgctgttttctgccagcaattcggtactttccagcgcccgctccgcctcaagctgacgttggctgtttaattgattacgcaaggcctgcaaatacgcatccagttgctggctctctttttccgccagctcactgcgtaagcgcgctaattcctggcggttattggcagacagctgcgccagctccagttcatcaacgagcgccttaagacgtgcagagtcagactgcaacgcgaaattttgtgcctgattgagcggagtattgccggtaagcgttcccaggcggcgctcgatctcatttaactgacggcgggcgtcggtttgctgttgcggcagttgattcaggctatcggcaatctcgcgggcgcgctcctgctcttgctgggcctgacggcttttatccagcaactggctgctgacctggagaatttcctgattcagcgcgtcggtagacattcccgggctcacgctgcgcggctcgtcacgcatgttgtttaattgtgcgcgcagagtagcggagagtttcggataattatcgataacttgctgatattgtttgatgcgctcaagggaaccttttcgttcctcaagcgcatttaaggcagactggagcgcctctacgacttccggctgtgcgggtttcgccgcttttgcctgctccagttcctgagtgatttgtttgctatcgggggccgtcgcggcgtacgccccccaactgaggcaccaggccatcagaaaagtgataatcaggcgcacgtcagcgtttcctttgatggattagacctggtcttttttgtcgtcaaccaatgggctggcgtcgtgttctgcttcgatctcttcagcaggaagcggggcaggttcagcgtctggcgtaacaaaggtttcggtagatactgccagcggctggccaattttcgtgacagacaggctttccagttgctcaaccagattcactttacccggtgcaaacaggttgataacggtggaaccgagtttaaagcgacccatttcctggcctttcagcagtgccacagaaccgtcgttttccccggcaggccaggtccagcgcttgatgataccttcgcgcggcggcgtaatggtgcccgcccagaccgtctcaatgctgccaacaatcgtcgctccgaccagaatctgcgccattgggccaaattcggtatcgaaaaggcaaatcacgcgttcgttacgggcaaacagattcggcacgttctgagccgtgagatggttaacggagaagagatcgcccggcacgtagatcatctcacgcagaataccgttgcacggcatgtgtacgcggtggtagtcacgcggggagaggtaagtggtcacaaacgtaccgttgcggaacaggtccgccatcagatagttgcctgccagcagggcttcgaggctgtagttgtggcctttggcttgcaggattttatcttcttcgattttacccaactggctgataacgccatcggcaggcatgaccagtacattcggatcggtatcgattgggcgtacttcgtcacgcagcggacggacaaagaattcgttaaaggtgcggtagctggcggtgtccggcttttgcgcctctttcatgtcgaccttgtagtatttaacgaacagatcgataaccagttttgtcagccatcctgcccgcttgcttgcgccccaacccgccaggcgagtaagccatagtttcggcagaatgtactgtaggctaagtttaaaactatttaacaaggtagcctccaggccattgttttgtcgttcctgatccggcctacatgccggatcctgaaaaaaaggggacgattctaacgacggttagcttaattgtcagtcatccgtatcagaaaagtttttacgcgtttttacctgcgccatgctttccagaatacggtgatagttttcgaaacgggtttccgcgattttcccttcctcaaccgcttcccggatagcgcagcccggatcggtatcgtgtttgcaatcgcgatatttacacagacctaaatagtcatggaattcgacaaagccctgagtgatttgttccggctccaggtgccagaggccgaactcacgcactcctggggagtcaatcacatcaccgccgtgcgggaagtgatacagccgagcggcggtcgtggtgtgctgaccgagcccgctgttgtcagagatatcgttggtcaggatctctttttgcagccccagcaacgcattcagcaggctggatttgccgacgccagactgcccggcaaaaatgctgatgcgcccggtcaacgcctcttccagcggttttagcccatcctgagtatggctggaaaccatcaatacgcgataaccgatattgcggtagatatccatctgctcgttgacgaacgccatgccttcgtcgtccagcaggtctatcttgttgagcacaataatcggctcaatctgcaaggtttcgcaggccaccaggtaacggtcgataatattgaggctcagctccggcaaaatggcggagacaatgacaatctggtcgatgttggcggcaataggttttacgccgtcgtagaaatccggacgcgtcaacacgctggtacgctcatgcaccgcttccacgatccctttgacatttacgccttccgccgccggtttacccggacgccagactacgcggtcgccggttaccaggctacggatggtacggcgaatattgcagcggtgaacgtcgccatcggcggattccacatcagcgtgcataccaaagcggctgatgacgataccttcatcaggctcgccaaacagattgtcgtcgtagtcgggcttctccttagacgttttaagacgacgctggtgattggcgttcacgcggcgctgctggcctttggagagtttatttttactcaatcgtacagactcctggtcgcccctgatgggcaaaacatctatgatacacgcaattgtggatcaatatagtcactgtgaatgggtggaaaatagcatgagtgccaatgaaaacaacctgatttggatcgatcttgagatgaccggtctggatcccgagcgcgatcgcattattgagattgccacgctggtgaccgatgccaacctgaatattctggcagaagggccgaccattgcagtacaccagtctgatgaacagctggcgctgatggatgactggaacgtgcgcacccataccgccagcgggctggtagagcgcgtgaaagcgagcacgatgggcgatcgggaagctgaactggcaacgctcgaatttttaaaacagtgggtgcctgcgggaaaaagcccgatttgcggtaacagcatcggtcaggaccgtcgtttcctgtttaaatacatgccggagctggaagcctacttccactaccgttatctcgatgtcagcaccctgaaagagctggcgcgccgctggaagccggaaattctggatggttttaccaagcaggggacgcatcaggcgatggatgatatccgtgaaagcgtggcggagctggcttactaccgcgagcattttatcaagctgtaaaatttttcctggtcacgtaagcgccggaatccacttgcggcggcgtgattttgacgctaaattgaacgtcttgctgataatttcagcacttgagataaaaacgcaaaaaaaacttttttggggggttgcagagggaaagatttctcgtataatgcgcctcccgtaacgacgcagaaatgcgaaaattacgaaagcaaaattaagtagtacgcgggaatagctcagttggtagagcacgaccttgccaaggtcggggtcgcgagttcgagtctcgtttcccgctccaaaatttgaaaagtgctgcaaagcacagaccacccaagcgggaatagctcagttggtagagcacgaccttgccaaggtcggggtcgcgagttcgagtctcgtttcccgctccaaaatttgaaagtgctgtaaggcacagaccacccaagcgggaatagctcagttggtagagcacgaccttgccaaggtcggggtcgcgagttcgagtctcgtttcccgctccaaattcttctctcaataaaatatccacagcgacgcgatgcgttattgctggtttttgttgtctctgacaaactcttgtaaacagagttatccacagcctcaggctgtaatcttaatttcaaagaaacttcgcacggtgaatagtatttttttaacctattgatagataagttaaaaattaagattccgttttgtcgagtcgatcacttgacgattttattcgtcttgaattgcaatgcgtttttatttttattcacaagctgtggatgaatcaggcgtcacgcggtaaccctttttcaatcacccgaaccagacgctgttttttcggcaattgcacttcgactatgcacgcatttcgtctctctatttgctgcgcaatcgcccacgctatgtgctcatcgagaagtgggtgctcacctttacgactttccagcgctgtcaaaatcgtttcatcccaaggggcattgcctaatgctacggcgatattacgcagccaacgcaggtgaccaatacgacgaatcgcgcttccttccgtgacttttaaaaacttctcttcgctccaggcgaataactcaatgagttccggtgcgtgtagcggcttacgcgggctgaaatcctcttctgtggtgagttgactatagcgattccacgggcagataagctggcagtcatcgcaaccgtaaatacggtttcccattaacggtcgcaactcttccgggatcgccccttcaagttcgatggtgagataagagatacagcggcgagcatcgacggtatatggctcgacgatggcaccggtcgggcaaatcgtcatacaggccacgcatttgccgcatccttcctcgactggttgatccacgggcagcggaatatcgaccagcaattcgcctaaaaagaagaagctaccggcctcgcgattgaggataagactgtgcttacctgtccagccgagcccagctttttcagctaacgggcgctcgagaataggcgcagaatcgacaaacggtctaaaattcaggctaacacaatgttgctgaatcatctcgcccagctttttgagtcggttgcgcagaagtttgtgatagtcacggcccagcgcataacggctaacatagccgagtttggggtttttcagcgtgctggcaaatgcggcgttagcaggaaggtaattcatccgcacgctgatcacgcgcagcgtaccgggcaataactcatgagggcgagcgcgcagcataccgtgacgtgccatccagtccatttcgccgtggtattgtttgtccagccatgcttgcagtttgggctcggactcgctgagatcggtatcggtaatacctacctgctgaaagcccagttccagcccccactgtttaattttttgcgctaactgattgagatcgaggggctcactcatgacggaccatacaatgaagaaaaaccccgtaagtataccacacaccgtctggtacgccgacgatatccgccgcggagaacgcgaggcggcagatgtgctggggctcacactctatgagctgatgcttcgcgctggcgaggccgcattccaggtgtgtcgtagcgcgtatcctgacgcccgccactggctggtgctgtgcggtcatggtaataacggcggcgatggctacgtggtcgcgcgactggccaaagcggtcggcattgaggtcacgttgttggcccaggagagcgacaaaccgttgccggaagaggccgcgctggcacgcgaagcatggttaaacgcgggtggcgagatccatgctagcaatattgtctggcccgaaagcgtagatctgattgttgatgcgctgctcggtaccggtttgcggcaagcgccccgcgaatccattagccagttaatcgaccacgctaattcccatcctgcgccgattgtggcggttgatatcccttccggcctgctggctgaaactggcgctacgccaggcgcggtgatcaacgccgatcacaccatcacttttattgcgctgaaaccaggcttgctcactggaaaagcgcgggatgttaccggacaactgcattttgacagtctggggctggatagttggctggcaggtcaggagacgaaaattcagcggtttagtgcagaacaactttctcactggctaaaaccgcgtcgcccgactagccataaaggcgatcacgggcggctggtaattatcggtggcgatcacggcacggcgggggctattcgtatgacgggggaagcggcgctgcgtgctggtgctggtttagtccgagtactgacccgcagtgaaaacattgcgccgctgctgactgcacgaccggaattgatggtgcatgaactgacgatggactctcttaccgaaagcctggaatgggccgatgtggtggtgattggtcccggtctgggccagcaagagtgggggaaaaaagcactgcaaaaagttgagaattttcgcaaaccgatgttgtgggatgccgatgcattgaacctgctggcaatcaatcccgataagcgtcacaatcgcgtgatcacgccgcatcctggcgaggccgcacggttgttaggctgttccgtcgctgaaattgaaagtgaccgcttacattgcgccaaacgtctggtacaacgttatggcggcgtagcggtgctgaaaggtgccggaaccgtggtcgccgcccatcctgacgctttaggcattattgatgccggaaatgcaggcatggcgagcggcggcatgggcgatgtgctctctggtattattggcgcattgcttgggcaaaaactgagcccgtatgatgcagcctgtgcaggctgtgtcgcgcacggtgcggcagctgacgtactggcggcgcgttttggaacgcgcgggatgctggcaaccgatctcttttccacgctacagcgtattgttaacccggaagtgactgataaaaaccatgatgaaagcagtaattccgctccctgaataaggaagtgactgataaaaaccatgatgaatcgagtaattccgctccctgatgagcaggcaacattagacctgggcgagcgggtagcgaaagcctgcgatggcgcaaccgtaatctatctgtatggcgatttaggcgcaggtaaaaccacctttagccggggctttttacaggctctgggtcatcagggtaatgtcaaaagccccacttatacgctggtcgaaccctatacgctcgacaacttaatggtctatcactttgatttgtaccgccttgccgatcccgaggagctggagtttatggggatccgcgattattttgccaacgatgccatctgcctggtggagtggccacaacaaggtacaggtgttcttcctgacccggatgtcgaaatacacattgattatcaggcacaaggccgtgaggcgcgcgtgagtgcggtttcctctgcgggtgaattgttgctggcgcgtttagccggttaacctttgaaaggtggcgggatgatgtatcgcatcagaaattggttggtagcgacgctgctgctgctgtgcacgccggtgggtgccgcgacgctctctgatattcaggtttctaacggtaatcaacaggcgcggataacgttgagttttattggcgatcctgattatgcgtttagccatcaaagcaaacgcaccgtggcgctcgatatcaaacaaacgggcgtgattcagggactgccgttgttgttcagcggcaataatctggtgaaggcgattcgctctggaacgcctaaagatgcacaaacgctacggctggtggtcgatcttaccgaaaacggtaaaaccgaagcggtgaagcggcagaatggcagcaattacactgtcgtctttacgattaacgccgatgtgccgccaccgcctcctccgccgcccgtggttgcgaaacgcgttgaaacgcctgcggttgtcgcaccgcgcgtcagcgaaccggcgcgcaatccgtttaaaacggaaagtaaccgcactacgggtgttatcagcagtaatacggtaacgcgtccggcagcgcgcgcgacggctaacactggcgataaaattatcatcgctattgatgccggacacggcggtcaggaccctggcgctatcggccccggtggtacgcgggagaaaaatgtcaccatcgccatcgcgcgtaaattgcgtactttgctcaatgacgatccgatgtttaaaggcgttttaacccgtgacggggattactttatcagcgtgatggggcgcagtgatgtggcacgtaagcaaaacgccaatttcctcgtgagcattcacgctgatgccgcaccgaaccgcagtgcgactggcgcttccgtatgggtgctctctaaccgtcgcgccaacagtgaaatggccagctggctggagcagcacgagaaacagagcgagctgctgggtggggcgggtgatgtgctggcgaacagtcagtctgacccctatttaagccaggcggtgctggatttacagttcggtcattcccagcgggtagggtatgatgtagcgaccagtatgatcagtcagttgcaacgcattggcgaaatacataaacgtcgaccagaacacgccagccttggcgttctgcgcagcccggatatcccaagtgtactggtcgaaaccggttttatcagcaacaacagcgaagaacgtttgctggcgagcgacgattaccaacaacagctggcagaagccatttacaaaggcctgcgcaattacttccttgcgcatccgatgcaatctgcgccgcagggtgcaacggcacaaactgccagtacggtgacgacgccagatcgcacgctgccaaactaaggacgattgatgccaattcaggtcttaccgccacaactggcgaaccagattgccgcaggtgaggtggtcgagcgacctgcgagcgtagtcaaagaactagtggaaaacagcctcgatgcaggtgcgacgcgtatcgatattgatatcgaacgcggtggggcgaaacttatccgcattcgtgataacggctgcggtatcaaaaaagatgagctggcgctggcgctggctcgtcatgccaccagtaaaatcgcctctctggacgatctcgaagccattatcagcctgggctttcgcggtgaggcgctggcgagtatcagtagcgtttcccgcctgacgctcactagtcgcaccgcagaacagcaggaagcctggcaggcctatgccgaagggcgcgatatgaacgtgacggtaaaaccggcggcgcatcctgtggggacgacgctggaggtgctggatctgttctacaacaccccggcgcggcgcaaattcctgcgcaccgagaaaaccgaatttaaccacattgatgagatcatccgccgcattgcgctggcgcgtttcgacgtcacgatcaacctgagccataacggtaaaattgtgcgtcagtaccgcgcagtgccggaaggcgggcaaaaagaacggcgcttaggcgcgatttgcggcaccgcttttcttgaacaagcgctggcgattgaatggcaacacggcgatctcacgctacgcggctgggtggccgatccaaatcacaccacgcccgcactggcagaaattcagtattgctacgtgaacggtcgcatgatgcgcgatcgcctgatcaatcacgcgatccgccaggcctgcgaagacaaactgggggccgatcagcaaccggcatttgtgttgtatctggagatcgacccacatcaggtggacgtcaacgtgcaccccgccaaacacgaagtgcgtttccatcagagccgtctggtgcatgattttatctatcagggcgtgctgagcgtgctacaacagcaactggaaacgccgctaccgctggacgatgaaccccaacctgcaccgcgttccattccggaaaaccgcgtggcggcggggcgcaatcactttgcagaaccggcagctcgtgagccggtagctccgcgctacactcctgcgccagcaagtggcagtcgtccggctgccccctggccgaatgcgcagccaggctaccagaaacagcaaggtgaagtgtatcgccagcttttgcaaacgcccgcgccgatgcaaaaattaaaagcgccggaaccgcaggaacctgcacttgcggcgaacagtcagagttttggtcgggtactgactatcgtccattccgactgtgcgttgctggagcgcgacggcaacattagtcttttatccttgccagtggcagaacgttggctgcgtcaggcacaattgacgccgggtgaagcgcccgtttgcgcccagccgctgctgattccgttgcggctaaaagtttctgccgaagaaaaaagcgcattagaaaaagcgcagtctgccctggcggaattgggtattgatttccagagtgatgcacagcatgtgaccatcagggcagtgcctttacccttacgccaacaaaatttacaaatcttgattcctgaactgataggctacctggcgaagcagtccgtattcgaacctggcaatattgcgcagtggattgcacgaaatctgatgagcgaacatgcgcagtggagtatggcacaggccataaccctgctggcggacgtggaacggttatgtccgcaacttgtgaaaacgccgccgggtggtctgttacaatctgttgatttacatccggcgataaaagccctgaaagatgagtgatatcagtaaggcgagcctgcctaaggcgatttttttgatggggccgacggcctccggtaaaacggcgttagccattgagctgcgtaaaattttaccagtagagttgataagcgttgattctgcccttatttacaaagggatggatatcgggacggcgaagccgaacgctgaagagttactcgccgcgccgcaccgattgctggatattcgcgatccgagccaggcttacagcgctgctgattttcgccgcgatgcgctggcggaaatggccgatatcaccgcggcggggcggatcccactgttagtgggcggtacgatgttgtatttcaaggcattgctggaagggttgagcccgctaccgagcgcagacccggaagtacgggccagaattgagcaacaggcggcagagcaaggttgggagagtttgcatcgtcaacttcaggaggtagatccggttgcggcagcaaggattcatccaaatgatccacaaaggctttcccgggcactggaagtttttttcattagcggtaaaactttaacggaactgacgcaaacgagtggagacgctctaccgtatcaggtgcatcagttcgccatcgccccggcgagccgtgaactgctccatcaacgcattgagcagcgttttcatcagatgttggctagtggttttgaagcagaagtccgggcgctttttgcccgaggagatttgcatacggacttgccttccattcgttgcgtgggttatcgccagatgtggtcttaccttgaaggcgaaatcagttacgatgaaatggtttatcgaggtgtttgcgccacgagacagttggcgaagcggcagataacctggctgcgtggttgggaaggggttcactggcttgacagtgaaaaaccagaacaggcgcgtgacgaagtattacaggttgttggtgctatcgcaggctgaatgtgtacaattgagacgtatcgtgcgcaattttttcagaatcgaaaggttcaaagtacaaataagcatataaggaaaagagagaatggctaaggggcaatctttacaagatccgttcctgaacgcactgcgtcgggaacgtgttccagtttctatttatttggtgaatggtattaagctgcaagggcaaatcgagtcttttgatcagttcgtgatcctgttgaaaaacacggtcagccagatggtttacaagcacgcgatttctactgttgtcccgtctcgcccggtttctcatcacagtaacaacgccggtggcggtaccagcagtaactaccatcatggtagcagcgcgcagaatacttccgcgcaacaggacagcgaagaaaccgaataaggtttcgggctgtttttttacacggggagccagcgatcctgcgttccccgctgatctatttagagggttatacgcttgtttgaccgttatgatgctggtgagcaggcggtactggtacacatctattttacgcaagacaaagatatggaagacctccaggagtttgaatctctggtctcttccgccggtgtcgaagcattgcaggtgattaccggtagccgtaaagcgccgcacccaaagtattttgtaggtgaaggtaaagcagttgaaattgcggaagctgtcaaagcgacgggtgctagcgtcgttctttttgaccatgccctgagcccggcgcaagagcgtaacctggagcgtttgtgcgagtgtcgtgttatcgaccgcaccggccttattttagatattttcgcccaacgtgcgcgtacccatgagggtaagttgcaggttgagctggcgcagctgcgccatctggctacgcgcctggtgcgtggctggacccaccttgaaagacagaaaggcgggataggtttgcgtggtccgggtgaaacccagctcgaaaccgaccgtcgtttgttgcgtaatcgcatcgtgcagatacagagccgcctggaaagagttgaaaagcagcgtgagcaggggcggcaaagccgtatcaaagccgacgttcctactgttagcctggtgggatataccaacgccggtaaatctacccttttcaatcgcatcaccgaagcgcgggtctacgcggcagaccagttgtttgccaccctcgacccgacgttgcggcgtattgacgttgcagatgtcggtgaaaccgtacttgcagataccgtagggtttattcgccacctgccgcacgatctggtggcggcatttaaagccacgttacaagagacgcggcaagccacattactgctgcacgtcattgatgcggcggatgtgcgtgtacaagaaaacatcgaagcggtgaatacggttcttgaagagatcgacgctcacgagatcccaaccctgctggtgatgaacaagatcgatatgctggaagatttcgaaccgcgtattgatcgggacgaagagaacaaaccgaaccgtgtctggctttccgcacagaccggagcggggataccacagctttttcaggctttgacggagcggctttccggcgaggtggcgcagcatacattgcgtctgccaccgcaggaagggcgtctgagaagtcgtttttatcagcttcaggcaatagaaaaagagtggatggaggaggacggcagcgtaagtctgcaagttcgtatgccgatcgttgactggcgtcgcctctgtaaacaagaaccggcgttgatcgattacctgatctaacggcgtagcgtctgaagcgtggagtcatatcctctggcgtcgaaagacaacagggatcaccgcataacaaatatggagcacaaacatggcgtggaatcagcccggtaataacggacaagaccgcgacccgtggggaagcagcaaacctggcggcaactctgagggaaatggaaacaaaggcggtcgcgatcaagggccacctgatttagatgatatcttccgcaaactgagcaaaaagctcggtggtctgggcggcggtaaaggcaccggatctggcggtggcagtagtagccaaggcccgcgcccgcagcttggcggtcgtgtcgttaccatcgcagcggcagcgattgtcattatctgggcggccagtggtttctataccattaaagaagccgaacgcggcgtggtaacacgctttggtaaattcagccatctggttgagccgggtctgaactggaaaccgacgtttatcgacgaagtcaaaccggtgaacgtggaagccgtgcgtgaactggccgcttctggtgtgatgctgacgagcgacgagaacgtagtgcgcgttgagatgaacgtgcagtaccgcgtcaccaatccggaaaaatatctgtatagcgtgaccagcccggatgacagcctgcgtcaggctaccgacagcgccctgcgtggagttatcggtaaatacaccatggaccgcattctgacggaaggtcgtaccgtgattcgtagcgatactcagcgcgaactggaagagacgattcgtccgtatgacatgggtatcacgctgctggacgtcaacttccaggctgctcgtccgccggaagaagtaaaagcggcgtttgacgatgcgattgccgcgcgtgaaaacgaacagcaatacattcgtgaagcagaagcgtataccaacgaagttcagccgcgtgcgaacggtcaggcgcaacgtatcctcgaagaggcgcgtgcgtacaaggcccagaccatcctggaagctcagggtgaagtggcgcgctttgctaaacttctgccggaatataaagccgcgccggaaattactcgcgagcgtctgtatatcgagacgatggaaaaagtgttgggtaacacccgcaaagtgctggttaacgataaaggtggcaacctgatggttctgccgttagaccagatgctgaaaggtggtaacgcccctgcggcgaagagcgataacggtgccagcaatctgctgcgtctgccgccagcctcttcctccacaaccagtggagcaagcaacacgagctccaccagtcagggcgatattatggaccaacgccgcgccaacgcgcagcgtaacgactaccagcgtcagggggaataacgatgcgtaagagtgttatcgcgattatcatcatcgtgctggtagtgctttacatgtctgtctttgtcgtcaaagaaggtgagcgcggtattacgctgcgttttggtaaggtactgcgtgacgatgacaacaaacctctggtttatgagccgggtctgcatttcaagataccgttcattgaaacggtgaaaatgctcgacgcacgtattcagaccatggacaaccaggccgaccgctttgtgaccaaagagaagaaagacctgatcgtcgactcttacatcaaatggcgcatcagcgatttcagccgttactacctggcaacgggtggtggcgacattagccaagcggaagtgctgttgaaacgtaagttctctgaccgtctgcgttctgaaattggtcgcctggacgtgaaagatatcgtcaccgattcccgtggtcgtctgaccctcgaagtacgtgacgcgctgaactccggttctgcgggtacagaagatgaagttactaccccggcggcagataacgccattgccgaagcggcagagcgcgtaacggctgagacgaagggcaaagttccggtcatcaacccgaacagtatggcggcgctgggtattgaagttgtcgatgtgcgtatcaagcagatcaacctgccgaccgaagtgtctgaagcgatctacaaccgtatgcgcgccgagcgtgaagcggtagcgcgtcgtcaccgtagtcaaggtcaggaagaagcggaaaaactgcgcgcgactgccgactatgaagtgaccagaacgctggcagaagctgagcgtcagggccgcatcatgcgtggtgaaggcgatgccgaagcagccaaactgtttgctgatgcattcagtaaagatccggacttctacgcattcatccgtagcctgcgtgcttatgagaacagcttctctggcaatcaggacgtgatggtcatgagcccggatagcgatttcttccgctacatgaagacgccgacttccgcaacgcgttaatataacgactgcggtacaggtcaataaagccaccgcatcctcagggatgtcggtggttttctttttctataaggataatgaatgaatagcacaatctggctggcgcttgccctggttttggtactggaaggtttagggccgatgctttacccgaaggcatggaagaagatgatctctgcgatgaccaatttgcccgataatattttacgtcgttttggcggtggacttgtggttgcgggcgttgtggtctactacatgttgaggaaaacgattggctgaacaaaaaacagactgatcgaggtcatttttgagtgcaaaaagtgctgtaactctgaaaaagcgatggtagaatccatttttaagcaaacggtgattttgaaaaatgggtaacaacgtcgtcgtactgggcacccaatggggtgacgaaggtaaaggtaagatcgtcgatcttctgactgaacgggctaaatatgttgtacgctaccagggcggtcacaacgcaggccatactctcgtaatcaacggtgaaaaaaccgttctccatcttattccaagtggtattctccgcgagaatgtaaccagcatcatcggtaacggtgttgtgctgtctccggccgcgctgatgaaagagatgaaagaactggaagaccgtggcatccccgttcgtgagcgtctgctgctgtctgaagcatgtccgctgatccttgattatcacgttgcgctggataacgcgcgtgagaaagcgcgtggcgcgaaagcgatcggcaccaccggtcgtggtatcgggcctgcttatgaagataaagtagcacgtcgcggtctgcgtgttggcgaccttttcgacaaagaaaccttcgctgaaaaactgaaagaagtgatggaatatcacaacttccagttggttaactactacaaagctgaagcggttgattaccagaaagttctggatgatacgatggctgttgccgacatcctgacttctatggtggttgacgtttctgacctgctcgaccaggcgcgtcagcgtggcgatttcgtcatgtttgaaggtgcgcagggtacgctgctggatatcgaccacggtacttatccgtacgtaacttcttccaacaccactgctggtggcgtggcgaccggttccggcctgggcccgcgttatgttgattacgttctgggtatcctcaaagcttactccactcgtgtaggtgcaggtccgttcccgaccgaactgtttgatgaaactggcgagttcctctgcaagcagggtaacgaattcggcgcaactacggggcgtcgtcgtcgtaccggctggctggacaccgttgccgttcgtcgtgcggtacagctgaactccctgtctggcttctgcctgactaaactggacgttctggatggcctgaaagaggttaaactctgcgtggcttaccgtatgccggatggtcgcgaagtgactaccactccgctggcagctgacgactggaaaggtgtagagccgatttacgaaaccatgccgggctggtctgaatccaccttcggcgtgaaagatcgtagcggcctgccgcaggcggcgctgaactatatcaagcgtattgaagagctgactggtgtgccgatcgatatcatctctaccggtccggatcgtactgaaaccatgattctgcgcgacccgttcgacgcgtaattctggtacgcctggcagatattttgcctgccgggcgaacagtgtgatacattgctgtgtcgggtaagccattacgctatccgacacagtgttaaatcctcgcttttttccttccccgaactgaaataaattagcgacacagcttgtggctggtttatcatcaatataaatgtattttttcccgatttcccttttgaggttgatgtgcagttaacgagtttcactgattacggattacgtgcgctgatctacatggcgagtttgccagaagggcggatgaccagtatttctgaagtgactgacgtctacggcgtctcccgtaatcatatggtcaaaataatcaatcaacttagtcgtgccggctacgtgactgctgttcgtggaaaaaatggcggcattcgcctgggtaaaccggcgagtgcgatacgtattggtgatgtggtgcgcgagctggagcccttaagcctggtgaattgcagcagtgagttttgccacattacacctgcctgtaggttgaaacaggcactttctaaggccgtgcaaagttttcttacggaactggataactacacgcttgccgatttggttgaagagaatcaaccgctttataaattattgctggtggagtgacgaaaatcttcatcagagatgacaacggaggaaccgagatgagtcaagatcctttccaggaacgcgaagctgaaaaatacgcgaatcccatccctagtcgggaatttatcctcgaacatttaaccaaacgtgaaaaaccggccagccgtgatgagctggcggtagaactgcacattgaaggcgaagagcagcttgaaggcctgcgtcgccgcctgcgcgcgatggagcgcgatggtcaactggtcttcactcgtcgtcagtgctatgcgctgccggaacgcctcgacctggtgaaaggtaccgttattggccaccgtgatggctacggctttctgcgggttgaagggcgtaaagatgatttgtatctctccagcgagcagatgaaaacctgcattcatggcgatcaggtgctggctcagccgctgggtgctgaccgtaaaggtcgtcgtgaagcgcgtattgtccgcgtactggtgccaaaaaccagccagattgttggtcgctactttaccgaagcgggcgtcggctttgtggttcctgacgacagccgtctgagcttcgatatcttaatcccgcccgatcagatcatgggcgcgcggatgggctttgtggtcgtagtcgaactgactcagcgtccgactcgccgcaccaaagcggtgggtaaaatcgtcgaagtgctgggcgacaatatgggcaccggcatggcggttgatatcgctctgcgtacccatgaaattccgtacatctggccgcaggctgttgagcaacaggttgccgggctgaaagaagaagtgccggaagaagcaaaagcgggccgtgttgatctgcgcgatttaccgctggtcaccattgatggcgaagacgcccgtgactttgacgatgcagtttactgcgagaaaaaacgcggcggcggctggcgtttatgggtcgcgattgccgacgtcagctactatgtgcgtccgagtacgccgctggacagagaagcgcgtaaccgtggcacgagcgtgtacttccctagccaggttatcccgatgctgccggaagtgctctctaacggcctgtgtagcctcaacccgcaggtagaccgcctgtgtatggtgtgcgagatgacggttagcagcaaaggccgcctgacgggctacaaattctacgaagcggtgatgagctctcacgcgcgtctgacctacaccaaagtctggcatattctgcagggcgatcaggatctgcgcgagcagtacgccccgctggttaagcatctcgaagagttgcataacctctataaagtgctggataaagcccgtgaagaacgcggtgggatcagttttgagagcgaagaagcgaagttcattttcaacgctgaacgccgtattgaacgtatcgaacagacccagcgtaacgacgcgcacaaattaattgaagagtgcatgattctggcgaatatcagcgcggcgcgtttcgttgagaaagcgaaagaaccggcactgttccgtattcacgacaagccgagcaccgaagcgattacctctttccgtagtgtgctggcggagctggggctggaactgccgggcggtaacaagccggaaccgcgtgactacgcggagctgctggagagcgttgccgatcgtcctgatgcagaaatgctgcaaaccatgctgctgcgcagcatgaaacaggcgatttacgatccagaaaaccgtggtcactttggcctggcattgcagtcctatgcgcactttactagcccgattcgtcgttatccagacctgacgctgcaccgcgccattaaatatctgctggcgaaagagcaggggcatcagggcaacaccactgaaaccggcggctaccattatagcatggaagagatgctgcaactgggtcagcactgtagcatggcggaacgtcgtgccgacgaagcaacgcgcgatgtggctgactggctgaagtgtgacttcatgctcgaccaggtaggtaacgtctttaaaggcgtaatttccagcgtcactggctttggcttcttcgtccgtctggacgacttgttcattgatggtctggtccatgtctctagcctggacaatgactactatcgctttgaccaggtagggcaacgcctgatgggggaatccagcggccagacttatcgcctgggcgatcgcgtggaagttcgcgtcgaagcggttaatatggacgagcgcaaaatcgactttagcctgatctccagcgaacgcgcaccgcgcaacgtcggtaaaacggcgcgcgagaaagcgaaaaaaggcgatgcaggtaaaaaaggcggcaagcgtcgtcaggtcggtaaaaaggtaaactttgagccagacagcgccttccgcggtgagaaaaaaacgaagccgaaagcggcgaagaaagacgcgagaaaagcgaaaaagccaagcgcgaaaacgcagaaaatagctgcagcgaccaaagcgaagcgtgcggcgaagaaaaaagtggcagagtgatcaataccctctttaaaagaagagggttagattgctgacaaaatgcgctttgttcatgccggatgcggcgtgaacgccttatccggcctacataatcacgcaaattcaatatattgcagagatcatgtaggccggataaacgtagtgcatcaggcaaaacgtaaacaacgagtacattaatgagcgaaatgatttacggcatccacgcagtgcaggccctgctggagcgcgcccctgaacgttttcaggaagtctttattttaaaaggccgtgaagataaacgtctgttaccgctgattcacgcccttgagtctcagggcgtggttatccagttggcaaaccgccaatatctcgacgagaaaagcgacggtgccgtgcatcagggcattatcgcccgcgtgaagccaggacgtcagtatcaggaaaacgatctgccggatctgatcgctagcctcgatcaaccgttcctgctgatcctcgacggcgtaaccgatccgcacaacctcggcgcgtgcctgcgtagtgcggacgccgcaggcgttcatgcggtgattgtgccgaaagatcgctccgcacagctcaacgctacggcgaaaaaagtagcctgcggcgcggcagaaagcgttccgctgattcgggtgactaaccttgcgcgcaccatgcgtatgttgcaggaagagaatatctggatcgtcggtacggcaggcgaggcggatcatacactctatcagagcaaaatgaccggacgcctggcgctggtgatgggtgcggaaggtgaaggtatgcgtcgcctgactcgtgaacattgcgatgagttgatcagcatcccgatggctggaagcgtttcttccctgaacgttagcgttgcgaccggaatttgcttatttgaagcggtgcgccagcgcagctaatttctcagaattatgaaaagccatccagatttggatggtttttttttgtctatagctggtaagataattacgtattgcaaatattcattttattaatatttaaacttaatctatatggaataatatatgacatggaatccgttggcgctagcgacggcgctgcaaactgtacctgaacaaaatattgatgtaacaaatagcgagaacgcattaattattaaaatgaatgattatggcgatttgcaaatcaatattctttttacttcccgccaaatgattatcgaaacctttatttgtccggtgagtagtatcagcaatccagatgaatttaataccttcttattaagaaatcagaagatgatgccgttgagtagcgtagggatctccagcgtacaacaggaagagtattacattgttttcggggcgttaagccttaaatcttctcttgaagatatcctgcttgagataaccagcctggtagataacgcattggatctggctgaaattacagaagaatatagtcactaattacaaggacgggtatttatgggaattttaaaaagtttatttacgctggggaaaagctttatctcccaggcggaagaatccattgaagaaacccagggcgtgcgcatgctggaacagcatattcgtgacgctaaagctgaactcgataaagccggaaaatctcgcgttgatctgctggcgcgggtgaaattaagtcacgataagctgaaagatttacgtgagcgcaaagccagtctggaagcccgtgcgctggaagcgttaagcaagaacgttaatccgagcttgattaacgaagttgctgaagaaatcgcgcgccttgagaatctcattaccgctgaagagcaagtgttgagcaatctggaagtctcccgtgatggcgtggaaaaagcagttacagcgacagcgcagcgtatcgctcagtttgagcagcaaatggaagtcgttaaagccactgaagccatgcagcgtgcacaacaggctgtaacaacctctaccgttggcgcatcttccagcgttagcacagcggcagaatccttaaaacgcctgcaaacgcgtcaggccgaacgtcaggctcgcctggatgctgccgcacagttggagaaagtcgcagacggtcgcgaccttgacgaaaagctggcggaagccggaattggcggtagcaataaaagtagcgcccaggatgtattagcaagactgcaacgccaacagggcgagtaatttttttgccagcctcgctaaaaggctggcaactattttaaggataaaatatgtctggttttttccagcgtctgtttggcaaggataataagccagctatcgctcgtggtccgctgggacttcatctcaatagtggctttacgctcgacacgttagcgtttcgtttgctggaagatgaattgctgattgcgctgccgggtgaggaatttacggtagccgccgtcagccacatcgatctgggcggcggtagtcagattttccgctactacactagtggcgatgagtttctgcaaatcaataccaccggcggcgaagatattgatgacattgatgatatcaagctctttgtctatgaagagagctacggtatcagtaaagagagtcactggcgcgaggcgatcaacgccaaagcgatgggagcaatgaccttaaactggcaggaaaaacgctggcagcgattttttaacagcgaagaaccgggaaatatcgaacccgtctacatgctggaaaaagtagaaaatcaaaaccatgccaaatgggaggtccataattttaccatgggctaccaacggcaagtaaccgaagatacttacgaatatttgctgctaaatggtgaggaatcttttaacgatctcggcgagccagagtggttatttagccgcgcgttgggtgtcgatatcccgctgacaagtcttcatattattggttaattacaaggacgtttacaatgcatatactggatagtcttcttgcctttagcgcctatttttttattggcgtggctatggtgattatttttctgtttatctattctaaaattacaccgcacaacgaatggcagttaatcaaaaacaataataccgcggcgagtctggcgttcagcggtacattgttgggttacgttatccccttatccagtgcggcaatcaatgcggtgagtattccagactatttcgcctggggcgggattgcactggtgattcagttactcgtttttgctggtgtcagactttatatgcccgcattaagcgaaaaaattattaatcacaataccgcagcaggaatgtttatgggaaccgccgcgctggctggcggtatttttaacgcagcttgtatgacatggtaatggacgatcatggccagaaaacgcaaaagtagaaataacagtaaaattggtcacggagcgattagtcgcattggtagaccgaataatccttttgaaccgtgccgcaatcgctacgcacaaaaatacttaacgttggcgctaatgggcggtgccgcttttttcgtattgaaaggttgtagcgatagtagcgatgtcgataacgacggcgacggaacgttttacgcgacagtgcaggattgtattgatgacggtaataatgccgacatttgcgcgcgtggctggaacaacgccaaaacggcattttatgccgatgttccgaagaatatgactcagcagaactgtcagtctaagtacgaaaattgctactacgacaatgttgaacagagttggatcccggtcgtttctggatttttgttaagccgggttattcgtaaagatcgcgatgagccgtttgtttataacagcggcggttcctcttttgctagccgcccagtctggcgcagcacttctggtgattactcctggcgctccggttctggcaaaaaagagtcttactctagcggcggctttaccaccaaaaaagcgtctaccgtttctcgcggcggctatggtcgttcttccagcgcccgtgggcattggggaggctaatcatgctgagacacaacgttcctgtgcgacgggatctggaccagatcgccgctgacaacggtttcgactttcatatcatcgacaatgaaatctattgggatgagagtcgggcttaccgttttactctgcgccagattgaagagcagatcgaaaaaccgactgcggaactgcatcagatgtgccttgaggtggtggatcgcgcggtaaaagatgaagagatcctgacgcaactggcgatcccgccgttgtactgggatgtgatcgctgaaagctggcgcgcccgcgatcctagcctgtatggacggatggattttgcctggtgtggcaatgcgccggtgaagctgctggagtacaacgccgatacgccaactagtttgtacgagagcgcttatttccagtggctgtggctggaggatgcccggcgcagcggcattattccgcgtgatgccgatcagtacaatgctattcaggaacgcctgattagtcgctttagcgagctttacagtcgggaaccgttttatttttgctgctgtcaggacaccgatgaagacaggagtaccgtgctgtacttgcaggactgcgcccagcaggcagggcaggagagccggtttatctacattgaagatctcggtttgggcgtcggcggcgtactgaccgatcttgatgataatgtcatccagcgtgcatttaagctgtatccgctggagtggatgatgcgtgacgataacggtccgctgctgcgcaagcgtcgcgagcaatgggtggagccgttatggaaaagtatcttgagtaataaagggctaatgccgctgctttggcgcttcttccctggtcatcctaatcttcttgcgtcctggttcgatggcgagaaaccgcagattgccgctggcgaaagctatgtgcgtaaaccaatctatagccgcgaaggcggcaacgtcaccatttttgacggcaagaataacgttgttgaccacgctgatggtgattacgccgatgaaccgatgatctaccaggcgtttcaacctctgccgcggtttggcgatagctacacactcatcggtagctggattgtcgatgatgaagcgtgcggaatggggatccgtgaagataacacactgatcaccaaagacaccagtcgtttcgttccgcattacattgctggataagaatgttttagcaatctctttctgtcatgaatccatggcagtgaccatactaatggtgactgccattgatggagggagacacagtgcactggcaaactcacaccgtttttaatcaacctataccattaaataacagcaacttatacctgtctgatggcgcgctctgcgaagcggtaacgcgtgaaggtgctggctgggatagcgattttctagccagtattggtcagcagttaggaacggctgaatcccttgaactggggcggctggcgaatgtgaatccgcctgaattattgcgctacgatgcgcaaggacgccgtctggacgatgtgcgttttcaccccgcctggcacctgctgatgcaggcgctatgtaccaatcgggtgcacaatcttgcctgggaagaagacgctcgctccggcgcatttgtggcgcgcgcggcgcgttttatgttacatgcgcaggttgaggcagggagcttatgtccgataaccatgacctttgccgccacgccattgttgttacagatgttacccgcgccgtttcaggactggaccacgccgctattgagcgatcgctacgattctcacttattgccaggtgggcaaaaacgcggtttgttgattggcatgggaatgacggaaaagcagggcggttccgatgttatgagcaacaccacccgtgcagagcgtctggaagatggctcttatcggctggtggggcataaatggtttttcagcgttccgcaaagcgatgcgcatctggtgctggcgcagaccgcgggtggtctgtcctgcttttttgtgccgcgctttttgcctgacgggcaacgcaacgcgattcgcctcgagcggctgaaagataagctgggtaatcgctctaacgccagttgcgaagtggagtttcaggatgccattggttggttgttggggctggaaggggaaggaattcgtctgatcctgaaaatgggtgggatgacgcgttttgattgcgccctgggtagccatgccatgatgcgccgtgcatttagcctggcgatttatcatgcacatcaacgccatgtttttggtaatccattgatccaacagccccttatgcgtcatgtcttaagtcgcatggcacttcagcttgaagggcaaacggcgttgctgtttcgtcttgcgcgagcgtgggaccggcgtgccgatgccaaagaagccctgtgggcgcgtttatttacgcctgcggcaaaatttgtgatctgcaaaagaggtatgccgtttgtggccgaagcgatggaggtgctgggcggcattggttattgcgaggagagtgagctgccgcggctttaccgggagatgccggtaaacagtatttgggaaggttccggcaatattatgtgcctggatgtgttgcgcgttctcaataagcaagcgggcgtatacgacttattgagcgaagcatttgtggaagtgaaagggcaggatcgctattttgatcgcgcggttcgtcgtttacagcagcagctgcgtaagccagctgaagaactggggcgagagattactcatcagctattcctgctgggctgcggtgcgcaaatgttgaaatatgcttctccgccaatggcgcaggcgtggtgtcaggtgatgttagatacgcgcggcggcgtacggttgagtgagcagatccagaatgatttattgctgcgggcgacggggggagtgtgtgtgtaagcgtatacgactgatgcgacgctggtttcgattaactaaatgaaatatgtgaaaattgtaggccggacaaggcgctcgcgccgcatccggcattgttcatttgctgtagatgacactcatgcatacagtatcgcctgtacgcgccagttatcaggctgctggtcttcgtacatggtaataatgcggtaccaactcgcaccttgttcatcggcctttaacgccacgatacgttccacgtcctgcggatccccactaatattgctaacactgatctgacctatttcattcaggcccgtcacgcagtcagcactggcgaattctgcagactgtgccgtggcgctcgcaggataagtcactaattgcaggctgggactggcaagtaattgtttcatcgtcagctccatttttcgtttccccacatgttgcagggcattccatcgcggtaataaacgcccaggcttccagccggtaatttattgtgcacaggtaaacgcatagggacgcaaagcaatgtaaagctgactatgtaagttgtctgatttatttacggtacaaaatggcttgactataccactgtcctgtcacgatggtttcgtccaccatgacgacaacgtaataatcagcttttgcagcgacagctttcgctttgatttctgctaatgcgtcatccggagaaccccgaaccatcgtgcttacgctacctattcgctgtaacccttgcgtctggtcgcggcgaatctcttgcggatggtccgttactggcggtgctggctgtggcgtaccttgcagtgcgctacaggcacttaacatcaacaccaataataaactggcaaaccggtaaataacgctattacgtttcctgctaaccatagtgtagtgccttattaatttaactttgggggaatgttcccgaattgttacctggtacgcgattttcgaatgaaaacgtgacgaaagcgtaacccacatctcaacattatgaactaataccgccagcagaaacttgtgctaaggatttcttcatgtcataccagacaaaaaggagagacagatgattgaaatagaaagtcgcgagctggcagatattcccgttcttcatgcttatcctgtcgggcaaaaagataccccgttaccgtgcgtaattttttatcacggctttactagttccagtctggtgtatagctattttgccgttgcgctggcgcaggctggtttgcgggtgatcatgccggatgcgcccgatcacggtagccgttttagtggtgacgcagcgcggcggttaaatcaattctggcaaatcttgctacaaagtatgcaggaattcactactttacgtgcggcaatagccgaagaaaactggctgcttgatgaccgtctggcagtcggtggcgcgagcatgggcgcgatgacggcactggggattaccgctcgccaccccacggtgagatgtaccgccagcatgatgggaagcggctattttacaagtctcgcccgtagtctgtttccaccgctgatacctgaaacggcagcacagcagaatgaattcaataacattgtcgcgccactggcagagtgggaagcgacaaaccacctggaacaacttagtgacagacctctactgctgtggcatggcctcgacgatgacgttgtgcctgccgacgaaagtctacgtttgcagcaggccttaagcgagacgggacgggataaactgctaacctgtagttggcagccaggcgtgcgtcaccgcattacgcctgaggcgttagatgctgccgtgacatttttccgccagcatctttaaacacgcagaatgctgaccccttgcgcttccagttgttgcaggatttccgggttagcatttttgccggtgataagcatatcgatttgatcggcacggctaaaaagcattcccgcgcgttcgccaatcttactgctatcaaccagtaccaccagtttccctaccacgctcagcatcttctgctctgccattgctgtcagcatatcggttttatacaacccttctgcggtcagcccttttccgctggtaaacatccagtgcccggcatagagactgttttcgctgccctgcgggcttaaagtgatggactgacttttgttgtactgtccgcccataatgatcacgctgtcatgttcttgatcgatcaggtaatttgccagcggtagataattagtgatgatttgcactggcttgccacacatttcccgcccaagcagaaacgcggtggagccgcagttgatgactacgctttcgcccggattaaccagctggctggccgctttagcgatacgtactttttcatcgtgattctgcgcctgatgcagattcatcggcgtccagcgcgggcgctgttgggtaatagcttctgcgccattgcgcacttttttcagtttgccgctttcgtcaagtttattgatatcgcgtcgcgcagtggcagggctaattcccagacgctcaacgactttctcaacggtcacaaagcccaattgtgcgagcatttccaggaggatttgatgtctttgtgcttcagtcatgagctattccgataaaatttgatttttttagatgatatttgaaatagccaggaaatactacgccggatagcgcgaacttctccacgctacccggtataaacgacagattacaggaaactcttgaacggcagatccggttcaatagtgaagcaatcatcgaaaccgcgcggatagtggtactcgaagttgtctttatccagcggccaggtaaatttgccacccacctgccagataaacggcttgaagccatacttcaggcgatcttttttcatctcccacagcacgcggatctcttgcggatcggcctggaagttactccagatatcgtggtggaacgggatcactactttcgcattcagcgcttcacccatacgcagcatatcggcgctggtcattttgtcggtgataccgcgcgggttttcgccgtagcttcctaacgccacgtcgatctgatgttcgttaccgtgcttcgcataatagttagagtagtgggagtcgccgctgtgatacagggagccgccaggcgttttgaacaggtagttcaccgcgcgatcgtccatgccatctggcagtacgccagccgctttttgatcggcaggcagggtgatcagtgcagtacggtcgaaagcatcaagcgcatgaatttcaatgtctttcacttttactacatcgcccggtttgaccacgatgcaacgctctttcggtacgccccagccaatccacaaatccacacaggttttcggtccgataaacggtacgtcatctgcacaattctgcatcacggcagcagcgacgttaacgtcgatatgatcgttgtgatcgtgagtcgccagtaccgcgtcgatctggcgaatcgcaaacggatcaagaacaaacggggtggtacgcaggtttggctgcagttttttcacgccagccatgcgctgcatctggtgaccctgtttcattaacgggttaccgtgactttgtttgccagtgccgcaccagaaatcaacgcaaacgttggtgccaccttcgcttttcaaccagatcccggtgcagccaagccaccacatcgcaaatgtgccaggagcgacctgttcttgttcaatttcttcattcaaccagctaccccactccgggaaagtgctcaggatccaggattcacgggtgatacttttcactttactcatcgccatttaccttcatgatagttcaattcgaatcaatatgtgattggttttgattaatcctgacactattttttcaggaaggcaatgaccattttttgactttttgccagggaagttgttgttgattttgagtatggaaagatttaatggaatgtgtaattcaattaactaaatgaatttaaatggataattgtttcgttgtgtgaatcccactctatccatgtggaattatttgcgggtcgcgtcacatttaatcataaataatcttgttgtgattacttttgaaaattagagtgagtgcacaacattccgggtgtgtggaatacccggttacctcttcttcaggagatcgttatggagatcctctacaacatctttaccgtgttttttaaccaggtcatgaccaatgccccgttgttgctgggtattgtgacctgtctgggctacatcctactgcgcaaaagtgtcagcgttattattaaaggcacgattaaaaccataattggtttcatgttgttgcaggcagggtccggcatcctcaccagcaccttcaaaccggtggtggcgaaaatgtccgaagtctacggcattaacggcgcaatttccgatacctacgctagtatgatggcaaccatcgaccgcatgggcgatgcctatagctgggtgggttacgccgtattgttagcgctggcgctgaacatctgttacgtgctgttgcgtcgcattaccggcattcgcacaatcatgttgaccggccacatcatgttccagcaggccgggttgattgccgttacgctgtttatcttcggctactccatgtggaccaccattatctgtaccgcgattctggttagcctctactggggcatcacttccaacatgatgtacaagccgactcaggaagtgacggatggctgtggtttctccatcggtcaccagcagcagtttgcaagttggattgcctataaagtcgcgccgttcctcggcaaaaaagaggagagcgttgaagacctcaaattgccgggctggctgaacattttccacgacaacatcgtctccacggcgattgtgatgaccatcttctttggtgccattctgctctccttcggtatcgacaccgtgcaggcgatggcaggcaaagtgcactggacggtgtacatcctgcaaactggtttctcctttgcggtggcgatcttcatcatcacgcagggtgtgcgcatgtttgtggcggaactctctgaagcatttaacggcatttcccagcgcctgatcccaggtgcggttctggcgattgactgtgcagctatctatagcttcgcgccgaacgccgtggtctggggctttatgtggggcaccatcggtcagctgattgcggttggcatcctggtcgcctgcggctccagcatcctgattattcctggctttatcccgatgttcttctctaacgccaccatcggcgtgttcgctaaccacttcggcggctggcgtgcggcgctgaagatttgtctggtgatggggatgatcgaaatctttggttgcgtctgggcggtgaaactcaccggtatgagtgcctggatgggcatggcggactggagcattctggcaccgccgatgatgcaaggcttcttctccatcggtatcgcctttatggccgtcatcattgtaattgcactggcttatatgttcttcgctggccgcgcgctgcgcgcagaagaagatgcagaaaaacaactggcagaacagtctgcttaataaggagttttgattatgaccgtacgtattctggctgtgtgtggcaacggacaaggcagttccatgatcatgaagatgaaagtggaccagtttttaacccaaagtaacattgaccatacggtaaacagctgcgcggttggcgagtacaaaagcgagttgagtggcgcggatatcatcatcgcttctacgcacattgcgggcgaaatcaccgtgaccggcaacaaatacgtggttggcgtgcgcaacatgctctctcctgccgactttggcccgaaactgctggaagtgatcaaagagcatttcccgcaggatgtgaagtaaggacgcgccatgaaattacgtgatagcctggcggaaaataaatccatccgcctgcaggctgaagcagagacatggcaggaagcggtgaaaatcggcgttgacctgctggtggcggcagatgtggtagagccgcgttactaccaggcgattctggatggcgttgaacagttcggtccttatttcgttatcgctccgggcctggcaatgccgcacgggcgtccggaagagggcgttaagaaaaccggtttctctctggtaacgctgaaaaagccgctggagttcaaccacgatgacaacgatccggtggatatcctcatcaccatggcggcggtcgatgccaatactcaccaggaagtgggcatcatgcagatcgtcaacctgtttgaagatgaagagaattttgaccgtttacgcgcctgccgtaccgagcaggaagtactggatctcattgaccgcaccaacgcggcagcttaagaaggaattgaacatgagtttaccgatgttgcaagtcgcgctggacaaccagactatggatagcgcctacgaaaccactcgcctgattgccgaagaagtcgacattatcgaagtgggcaccattctgtgcgtgggcgaaggcgtgcgtgcggttcgtgacctgaaagcgctctacccgcacaaaatcgtactggcagacgccaaaattgccgatgcaggcaaaatccttagccgtatgtgcttcgaagccaacgctgactgggtgacggtaatttgctgtgcggatatcaacaccgccaaaggcgcgctggacgtggcaaaagagtttaacggcgacgtgcagatcgaactgaccggttactggacctgggaacaggcgcaacagtggcgcgatgcaggcattgggcaggtggtttatcaccgcagccgtgacgcgcaggccgcaggcgtggcgtggggcgaagcggacatcaccgcgatcaaacgtctttccgatatgggcttcaaagtcaccgtcaccggaggcctggcgctggaagatctgccgctgttcaagggtattccgattcacgtctttatcgcgggccgtagtatccgtgatgccgcttctccggtggaagccgcacgtcagttcaaacgttccatcgctgaactgtggggctaaggagcggatatgttgtccaaacaaatcccgcttggcatctatgaaaaagcgctccccgccggggagtgctggctggaacgcctgcaactggcaaaaacgttaggcttcgattttgtcgaaatgagcgtagatgaaactgacgatcgcctgagccgcctcaactggagccgcgagcagcgtctggcgctggtcaatgcgattgttgaaaccggcgtgcgcgtgccgtccatgtgcctttctgctcatcgtcgtttcccgctgggcagtgaagatgacgcggtgcgggcgcaggggctggagattatgcgtaaagctatccagttcgcccaggatgtcggtattcgcgtgatccagctggcgggctatgacgtttactatcaggaagccaataacgaaacgcgtcgtcgtttccgtgacggcctgaaagagagcgttgagatggcaagccgcgcgcaggtgacgctggcgatggagatcatggattatccgttgatgagctccatcagcaaggcgctgggatacgcgcactatctcaacaatccgtggttccagctctacccggatatcggcaacctgagcgcgtgggacaacgatgtgcagatggagttgcaggccggaatcgggcatatcgtcgcggtacatgtgaaagacaccaaacctggcgtcttcaaaaacgtgccgtttggcgaaggtgtagtggatttcgaacgttgtttcgaaacgctcaaacagagtggctattgcgggccgtacctgattgagatgtggagcgaaacggcggaagacccggcggcagaagtggcgaaagcgcgtgattgggtgaaagcgcgcatggcgaaagcgggcatggtggaggcggcataatgcaaaagctaaaacagcaggtatttgaagccaacatggagctgccgcgctacgggctggtgacctttacctggggcaacgtcagcgctatcgaccgcgaacgcgggctggtggtgatcaagcccagcggcgttgcctacgaaaccatgaaagcggccgatatggtggtggttgatatgagcggcaaggtggtggaaggggagtatcgcccatcttccgacactgcgacgcatctcgaactctaccgtcgttacccgagccttggtggcattgtccatacccactccactcatgccaccgcatgggcgcaggcggggctggcgatcccggcgttaggcaccacgcacgccgactacttctttggcgacattccgtgtacgcgcgggttaagcgaagaagaggtgcagggcgagtatgaactgaacaccggcaaagtgattatcgaaacgctgggcaacgccgagccgctgcatacgccgggaattgtggtgtatcagcacgggccgttcgcctgggggaaagatgctcacgatgcggtgcataacgcggtggtgatggaagaagtggcgaaaatggcgtggattgcccgcggcattaacccacaactcaatcacatcgacagcttcctgatgaataaacacttcatgcgtaaacacggtcctaacgcttattacgggcagaagtaaaacacgcgctgcggaaatttccttcctcgggagataactggtctaattccgcagccgtttttcaaaaaaaagccccctgcgaagggggcaaagcaaactatggcaatgtttcgttggttatacctggtgttagcgataaatatccgcgctggcgtgcatattgccgttactccccggttcccgcatcagaattacgtggtagtacgttgcgccttgcgcatctgtttcttcatttaatgcctgacgtgcttcgctttcagtggcgaaattatgattgatataaatcacgcctaagctttgcacatcgtccatatttctggcctggtggttattaatttcaatggctgcccatgtatttgcacttagcaaaagcacagccagaagggctaaaacacgactgaacatagatacctcctcgacggctgactttgtgtgctctcctctgtgatgatcttctgatttaattttaatcaatgataaagaagttgatggtgaccatttctgatgcagttgttcaaaaaaacaccatgatgaagtgtgatgaacttcaaatcagcgtgttagaggttaattgcgaaaggggagatttatttcggctctgcccttgagtttagcgaggcatacaagtactataacgcgtcatttttcagccgacctttaacacgttccttgcctccccgggattcggctgacccagacaggaggctgaataatccgtaaggagcaattcgatgcgtcattacgaaatcgtttttatggtccatcctgaccagagcgaacaggttccgggcatgatcgagcgctacactgctgccatcactggtgcagaaggcaagatccaccgtctggaagactggggccgccgtcagctggcttacccgatcaacaaactgcacaaagcacactacgttctgatgaatgttgaagctccgcaggaagtgatcgatgagctggaaactaccttccgcttcaacgatgccgttatccgcagcatggttatgcgtaccaagcacgctgttaccgaagcatctccgatggttaaagcgaaagacgagcgccgtgagcgtcgcgatgatttcgcaaacgaaaccgctgatgatgctgaagctggggattctgaagagtaatttctgatgaccaaccgtctggtgttgtccggcaccgtgtgcagggctccccttcgaaaggtcagtccaagtggaattcctcactgccagttcgtgcttgagcatcgttctgtgcaggaggaagccggctttcaccggcaggcgtggtgtcaaatgcccgttattgttagcggacacgaaaaccaggccattactcacagtataacggtcggcagtcgcataaccgttcaggggttcattagttgccacaaggcaaagaacggactgagcaaaatggttttgcatgccgagcagattgaattgatagattctggagactaaccatatggcacgttatttccgtcgtcgcaagttctgccgtttcaccgcggaaggcgttcaagagatcgactataaagatatcgctacgctgaaaaactacatcaccgaaagcggtaagattgtcccaagccgtatcaccggtacccgtgcaaaataccagcgtcagctggctcgcgctatcaaacgcgctcgctacctgtccctgctgccgtacactgatcgccatcagtaatcggtcacggtccattaatacgactttgagaggataaggtaatgcaagttattctgcttgataaagtagcaaacctgggtagcctgggtgatcaggtaaacgttaaagcgggctatgctcgtaacttcctggtaccgcagggtaaagctgttccagctaccaagaaaaacattgaattcttcgaagctcgtcgcgctgaactggaagctaaactggctgaagttctggcagctgctaatgctcgcgctgagaaaatcaatgcactggaaactgttaccatcgcgtctaaagctggcgacgaaggtaaactgttcggttccatcggtactcgcgacatcgctgacgctgtaactgcagctggcgttgaagtggctaagagcgaagttcgtctgccgaacggcgttctgcgtaccactggcgaacacgaagtgagcttccaggttcacagcgaagtattcgcgaaagtgatcgtaaacgtagtagctgaataattcgttattcaacgagacgtaaaaacgccgaccattggtcggcgttttgctttctatttttcgtcaggtattagtttcgcaagtagatccattcaccattctcttgtgtccataagtcaggatggtttgctggcgttagatacatacgagcgcaactgatgtctcgctcctgcggcactcgctcgaaacccaaaccgctgtagattgcggcactactacttaaggaacgcagaccaattttcaaatcatggggtaaatcagaatacgcgtttagcaatgcagcaatgatgaatccgagggcattagaaacgcctgtaacagtgcgaagttggtcgatataaagatcgattgttggtagttcagaactccagcaattaggcatttgggcaggaagggttacaacgtatcctatcgtttggccggtatagtctggagtaccataaccaggtcccaaaaccacttcgtgtattgtgtatttactgttgggttcgaaggattcgacatcttgcaataaatatttcagttctgcggttaacctcgcacccgcgtaagctttattgtatttctgggcgtgaatattatctaatgtagcttcatggttccatccaaaagaattatcaccattcattgtgattccatcgtaagcattacacctcgtcgctaacttattgaatgcttgccagtcactgagatctagtttgtggatctcaacagtacgtctgccatcgcaattatgatctcttccacgattactaagtaatgtagcgcgtgcgtattgatgaaattttaattttactggtttgtcggtggagctaaaacgagataaatatgcaggaaaactataaatagtcgttggtaatgtcattgtaatgttacctgtttaatgtttttataaatatcgcagctgaatgttcacagaaaaaaatcgatattaataaaaataagtttgttttctgaagtggtgaaaatagcggatggtgaaagatattaatatcaaaaatcgctcattatggatataacgatgcacccggggagaaaatgacttccacgccttacaccgtacattcttgttgtgcggtatgtaattattctacgctgtcggtatcggtgtattcgttaatcagcaggttagccagccacaaaaagccattgagaaaattattgattttacatgggattattatattgctaatccttggtttttaaaaattgtgcatagtgaaaatcaaagtaaaggtgtgcattatgcaaaaagtcagcgtctcttagaaattaaccatgcgcacttgcagttaatggaatccttattggatgaagggaagaaacacaatatttttaagccagatatcgacccattgcaggtgaatattaatattgctgcgcttggcggatattatttgatcaaccagcatacgcttggcctggtttatcacatcagtatggttagtccccaggcactggaagccagacgtaaggtcatcaaagagacaatccttagctggcttttggttgaccctagttctaccgcgcacgaataattaccgcgcacgaataaaactgccatccggctggcgggtgaacaggacctgttgattattccccgtatcaatggttaagcccgtcaccacgccgctggcgttctggcggattttcaccatctgcccgttttgcaaattactcagcggcttacccgcgccttctacctgcgccattgcatagacatcggtagcgggcagtccgtggtcgcggaacagctgcgccatcgttttaccgggttcgacacggtaagagcgccattgattatcaattccgctatctggctggaatggttgcgtttgggtagtttgcggctgctcttctggctggccttcctgtataggttctggagcgaccggagccacctgatcaggatcattttgtggggtaactaattgcgcccgcagctgttcttctgtcggcggttgactttggctctgaatatctaactgcgcttcacgcgtcaccaccggcgcgttgggcgtatcatcagatggaagcagaaatccgaccaccaatacaatggcggcaataatgatcccccgacgatgcatcggcggcagcgggtccatgaagcgaaaattgtccggcgcgtgccagactttctccagggttggttttagttcaaagcgcccgggcatggtttcctcctgctccgcgtcttgttcctcaatcatagcctatgaataagctaacgctatgatgtccgtggtaaacccgcctttattatattcatacgggatattgctattgtttctttttccctgggatttgtcatcattcccgcgacaaagttttacccaaagaagtgtggctgatatgctgcccgctactttataccctaagaaaggaaatacgatgaccaccccaacttttgacaccatcgaagcgcaagcaagctacggcattggtttgcaggtagggcaacaactgagtgaatctggcctggaagggctgctgccagaagcactggttgcaggtattgccgatgcgctggaaggcaaacatccggctgttccggttgatgtggtgcatcgcgcgctgcgtgaaatccacgagcgcgccgatgccgttcgtcgtcagcgtttccaggcgatggctgctgaaggtgtgaaatacctggaagaaaacgccaaaaaagaaggtgtgaatagcaccgaatctggcctgcaattccgcgtgatcaaccagggtgaaggcgcaattccggcacgtaccgaccgcgttcgtgttcattacaccggtaaactgatcgacggcaccgtgtttgacagctccgttgctcgtggtgaacccgctgaattcccggttaatggcgtgatccctggctggattgaagcactgactctgatgccggtaggttctaaatgggaactgactatcccgcaggaactggcatatggcgagcgcggcgcaggcgcatccatccctccgttcagcaccctggtgtttgaagtcgaactgctggaaatcctctaagcagcgcattctgttcccctcgaacgagaggggagcaggcattcagcaataaacccttcagtttgccaaacggcgctattttgtgttgcaaagaccccgtaagcgtgtatttttgtgagctgtttcgcgttatcaccgtgatatgacactcactttaaacataaaattaacattagatctaaatcttagtattcatcccgcgtattgttacctaatatcgatgagtcccgatacagattcgtcgtatcatagactgactaaaggccgtagagcctgaacaacacagacaggtacaggaagaaaaaaacatggtagatcaggtaaaagtcgttgccgatgatcaggctccggctgaacagagcctacggcgcaatctcacaaaccgacatattcagcttattgccattggcggtgccattggtacggggttgtttatggggtctggcaaaacgattagccttgccgggccgagcatcattttcgtttatatgatcattggttttatgctctttttcgtgatgcgggcaatgggggaattgctgcttagcaatctggaatacaaatcttttagtgacttcgcttccgatttactcgggccgtgggcaggatatttcaccggctggacttactggttctgctgggttgtaaccggtatggcagacgtggtggcgatcacggcttatgctcagttctggttccccgatctctccgactgggtcgccagcctggcggtgatagtgctgctgctgacgctcaatctcgccaccgtgaaaatgttcggtgagatggagttctggtttgcgatgatcaaaatcgtcgccattgtgagcctgattgtcgtcggcctggtcatggtggcgatgcactttcagagtccgactggtgtggaagcgagtttcgcgcatttgtggaatgacggcggctggttcccgaaaggtttaagtggcttctttgccggattccagatagcggttttcgctttcgtggggattgagctggtaggtacaacagctgcggaaaccaaagatccagagaaaagtctgccacgcgcgattaactccattccgatccgtatcattatgttctacgtcttcgcgctgattgtgattatgtccgtgacgccgtggagtagcgtagtcccggagaaaagcccgtttgttgaactgttcgtgttggtagggctgcctgctgccgcaagcgtgatcaactttgtggtgctgacctctgcggcgtcttccgctaacagcggcgtcttctctaccagccgtatgctgtttggtctggcgcaggaaggtgtggcaccgaaagcgttcgctaaactttctaagcgcgcagtacccgcgaaagggctgacgttcagctgtatctgtctgctcggcggcgtggtgatgttgtatgtgaatcctagtgtgattggcgcgttcacgatgattacaaccgtttccgcgattctgtttatgttcgtctggacgattatcctttgcagctaccttgtgtatcgcaaacagcgtcctcatctacatgagaagagcatctacaagatgccgctcggcaagctgatgtgctgggtatgtatggcgttctttgtgttcgtggtcgtgttgctgacactggaagatgacactcgccaggcgctgctggttaccccgctgtggtttatcgcgctggggttgggctggctgtttattggtaagaagcgggctgctgaactgcggaaataaccgcattatcatgctggatggcgcaatgccatccagcttttagatcactcacccgccagcgcgcgtgggaacagtacattgttttccagactgatgtgatccatcaggtcatcaatcagttcattaatgccgttatacatcgctttccaggtggtgcaggcttctggcggcggtgtgacgttattggtggtgtgtttaatcacttccagcagttcgcccgcttcatcgtgctcgctttccattacgctgattggccccattgcctggctgcccatgccttgtttgatcatcgggaagaggatctgctcttctttcatcatgtggctggaaagctcttcatgcagcatggtcaggtattttgtcagcccttttggcacgctcggtttgtcggcgtgaacgcgctcgactttagtcgcttgcagaatcagctccggcagttgctcgcggtgacgatcgtggtagcgcacgatgatatggtcgatgatttctgccagcggggcgctacgccagtctttctcaatcggttgttcagcgagctttgccagttcagcttcaatgacctcaacatccagttctttacgtgccgccgcgcgcgccagcgtctgcttaccgccacagcagtaatccatatcatatttacgaaacagagcactagcgcgaggaatagagagcgccagttcacctaaaggttggtcgcgataagccatagctgatacctcattcttaataagataagatgtattttaaatgcatctttaaggcaaaagctataacccttacgtagcagaggcttatttaactcactgccagcgtgtcaactttcactgacagattcagttaaaggtttttctggttttgctctgaccgcgatgaccacgccaatcactaacagcgcgataccgctcagcgtcattagcggcggcatttgctggcggagtaaaaaggtgtacagcaaacctgccagcgtttcgaaaacaatcagcggcccgagaatcactgtcggtaatagctggctggcgacgttccagcagagtgcgccaacccaactgcaaagcacggctatcgcaaccatcagactaataaacaccagcggacgggggccaaagggtagggagaagtccggcgtttgcgtattcagccagtaacaagcgacgagatagccgataagactaaccggcagtgtgaccagcgcctgcgctgttgcccacatcatcggatgtttgtcgggattttcccgcagccagcgggcgttgcgcagggcataccacgcccagcagaccacggaaactaacgccagcacgatgccagaggtataacgtgcccagtcaaaatcggggagtccgtggtttaactcagcaatattcacacacgccaggccgatgccaatacaaatcagtgctggggcgagttttccccacgcgagtttgccgtcgcgctggctataaagcagattggcaaagacaggaatgaccaccggcagggtgccgataatcatcgtggaaacaggcgcgccagtacgttgaatggcactggcaaggcagaagtaatagatgaggttgcccatcatagtgagcatcaaggcggtaagccagtcgcgacgcgccaactgacgcagacgcacgcgtcccagccaggcaatgggcagcgcaattaaccctaacgccagataacgccccatgctctgcaacatcgccgggtattccggcacgatcaacggcccgacaaaaataagcccccacatcaaccctgctaacagggcgtacagcacgccgctaatcattactggcatccattgatctgtcagaagaaagttcaggaagcagacatgattgctcccggcatcccgtcattatcagagaggatgcgggaggatgccactttaattaattagttattaacattaaaaagatggcttacgctttcggctaacgttgtcgttgggtggccaatcaatttgctaagtgttttgctgtcatcaaacagaccgcctttgcttgcgccaacgtcagaatccgccagcatatccgccagtccgtcgggcagtccgacgcttttcagtgccgcggcgaaatcggcttcgctcagattttgataggtaacctgtttgccgctctgtttggtcagctctgccgctaactgtgtcaacgtccaggcactatcgcccgccagttcgtaaaccttgccttcgtgaccggcttcgctaatcacgcgtgccgcagctgccgcataatctgcccgcgttgcactggcgattttgccatcgcccgccgcaccgataaatacgccgtgttccagtgctgccggggcgctggcgaggtagttttcgctgtaccagccgttgcgcagcagggtgtaaacgatgccagaatcagccagcattttctccgtctcgatgtgctcatcggcgaggccgagcggggaggtatctgcatgtagcaggctggtataagcgataaatttcacgccagccgcctttgcggcattaataacattacgatgctgcggggcacgttgacccacttcgctggaagagatcagcagtagtttttccactccctgaagtgcagatgtcagtgcggcttcatcgccgtagtcagcctgacgcacggtaatgccttgtgctgccagggcttgggcttttgccggattacgaacgatagccactatttggctggcaggaaccgttttcatcaaggattcaataacatagtgaccaagttggccagtggcaccagtaatagcgatcatgggaagtctccatcgttttgtcttgtgtttaaatacgctaacacctaaacttacttttagtaagtacgtacaaaaaggtaagtatgaaatgagtcaggttagcctgagccaacaactgaaagagggtaatctctttgcggaacagtgcccgagccgcgaggtgttgaaacacgtcaccagccgttggggggtgttgattctggtggcgctacgcgaaggtactcatcgctttagcgacctgcggcgcaaaatcggtggggtgagtgaaaagatgcttgcgcagagcttacaggcgttagaacaggatggttttcttaaccgtatcgcgtatccggtggtgccgccgcatgtggaatatagcctcacgccgctgggcgagcaggtgagcgaaaaggttgctgcactggcggactggattgagttgaatttgcccgaggtgttggcggtgcgggatgaacgtgcggcataactgccggatgcgctgagcttatctggtctacggtgcatggcttgtagggcggataagatgcgccagcatcgcatccgccaataaatgccggatgcggttgatgatttataggccgaaaaagaagtgttttacttactcaaatccacctgataaatcgcaaacccgatatcatcggtcgcgactttattcatcggatactgccctttctctttaataaacgctgcggctttatcactcggagaggtttcgaaacggatatccagtttcttatcgccagctatcggtgctaaacgccagttgttatctgccgccgggtgaatttcccccgcacgtttgctctcatcagcaatccacgctgccagcacgctgcggttctcatccggactagcaaaagcgatatggctgtcgcccgtaccggcaaatttgccgccgtaagcgcgatagttattggtggcaaccaggaacatggcgttcggatcaatcggcttgccattaaaggtcaggttcttaatcctttccgcattggcattaatcatctggcactcgccgtcataacgggcgggctgggtaacatcaatctgataattcacaccatcaataacatcaaagttataagtgcggaaaccatcccagttgatgagactctgtggtttcgtgctgttgggatcaatctggttaaactgtcccgcggagcactccagccactctttcacctctttaccgctggctttcaccacaatcagcgtattgggatagagataaagatcggcggcattacggaaggtcaactggcctttttccacctccacatagcttgccgggtcatttttgcgaccaccgactttaaacggtgcggcagcactaagcaccggcagttttgccagatccggatcgccctgaatgtaatgctcgacatacgctttttgcgcgttgttcaccacctgcacggtcggatcgtcctgcaccagcgccagatagctatacatattgtcggcagatttaccgattggcttgctgacgaactggcgtgtggcatcgtgatcggctttgagtgtttctaccagcttgctgtcttccgccgcgagggattttttattagcgatgtcgtaaatcggtcgtgcttccgctttcgcctgcgtcacctgccatttaccgctgtcattactgagttgtaagtcgaccacaccaagatgatcgccccacatgcctggcattaccgccggaacaccattcagcgtgcctttggcgatatcagccccttcgatatcagcaaaatctttacctgggaaaacggcgtgagcatggccaaacataatggcgttaacgcccggaatttcactgaggtaataaacactgttttccgccatcactttatacggatcggcagatagcccggaatgtgccagaacgacaacaacatcggcacctttctcgcgcatttcaggcacgtatttgcgcacggtttcggtaatatcattcaccgtcactttcccggataaattagctttatcccagcccatgatttgtggtggcacgacgccaatatagccaatcttcagcgtctgtttttttccgtctttatcgaccacttcggtgtctttaattaaatacggtgtaaacattggctgtttggttctggcgtcaatgacgttggcatttacataagggaatttcgctcctgccagcgcatttttcaggtaatccagaccgtagttaaactcgtggttgccaagcgttccgacggtatagtccagcgtatttaatgccttatagaccgggtgaatatcacctgcttttaatcctttcgcgctcatgtaatcggccagcggactcccctgaatcaaatcgccgttatcaaccagtacgctgtttttcacttcattgcgggcatcgttaatcaggcttgccgtacgtaccagtccgaatttttccgtggcggtgtctttgtaataatcgaaatccatcatgttgctatgcagatcagtggtttccatgatacgcagatcgaccgtcgctgcattcacactggcggcaatcagcgtggccaggagcgttgcgctaaacttaatcatcagggacatccttttatcatcgggaatacgaaagaaaagggagaataaacgtcttacttatagaacagtgaagaatgccacaattttacgctttgaaaatgatgacactatcacagttggcgcattcattaacgatagggtataagtaaaacaataagttaacaccgctcacagagacgaggtggagaaatgttagatcaagtatgccagcttgcacggaatgcaggcgatgccattatgcaggtctacgacgggacgaaaccgatggacgtcgtcagcaaagcggacaattctccggtaacggcagcggatattgccgctcacaccgttatcatggacggtttacgtacgctgacaccggatgttccggtcctttctgaagaagatcctcccggttgggaagtccgtcagcactggcagcgttactggctggtagacccgctggatggtactaaagagtttattaaacgtaatggcgaattcaccgttaacattgcgctcattgaccatggcaaaccgattttaggcgtggtgtatgcgccggtaatgaacgtaatgtacagcgcggcagaaggcaaagcgtggaaagaagagtgcggtgtgcgcaagcagattcaggtccgcgatgcgcgcccgccgctggtggtgatcagccgttcccatgcggatgcggagctgaaagagtatctgcaacagcttggcgaacatcagaccacgtccatcggctctagcctgaaattctgcctggtggcggaaggacaggcgcagctgtacccgcgcttcggaccaacgaatatttgggacaccgccgctggacatgctgtagctgcagctgccggagcgcacgttcacgactggcagggtaaaccgctggattacactccgcgtgagagcttcctgaatccggggttcagagtgtctatttactaaattcagatggcagaaacagtgtatttcctgattctgccatcctgatttctcccaacctaaaaagttataaataaaaagagattgtatttaaagtgcaaaaattcaattgctaataagttacattttaataatgagcgttttttgatagtttacttctatagtgagatatttaatggcgacataaagtaaccaaataaaataaggttgtcatatgttacccaggatcagacacaataattttattggtgcggtggagttatttgtaaagtctagctatacaaaaacacatagtaacaatttttttaacaacatccatcatgcatttaagaaaaaagattggattagcaattatgatagcctgttaactttgagggagttctttcgttgcgcaactcagattgataaaagtggttatcaggtgcttagtagtaaaaatgaaactgttcacgccatggataagtttcttatcagtttcagccttaaagataacggtgccgaatatacaatgacattgcgaggtagtggatttgaatacgaagaaatacccataacaataaatgaatataacagtttcatggatttcaaaaaccgtgaatttccgttagaacaaaacagacgattgtatgcccgggatattctacagaaaaaacagtctgacataccgaaaaggattaaaggttatattcaccaggcgattggtgacgtgtctttaggttatgccttattggaggatatagtaagcaaattaaaacggggtaaatttgaactccaaataccaggaggtggaattaaagaatgcgatggatggtatatttacgaaaaaataattgatgataattttgccatagtcatagaatctttgggctttgcgcttaaaatctatggaggggatgaacgttttcgtaatggttcctctgttgttttggaggatgaagattactctcttatttataattttctggttaatgcaggttgccaacaagtcgaattagccgaacaagtggatgcgatagtaagtgcgaatctggccgcagatagcgatattaccaaagaaaagatttgcgagaaatataaaagcaccattgaggcgtttaaaaaagagcaactagcgttaccagtattagttcggcgtaagaacagtgagacttaattcccctatcccatagataacgataggggaaaattatttttgcagaatttatgttattgccattatttgagcaacttttgcagcaggtccatcacttgctgcacctcttccggtgtgagcgccccgtctttggcccattgcacgcgaccatccttatccagcaccactacagcggaactttcttcatccagctgccaggcaccgagcgcgacgccattgctatcgacaataaactggctccagggataaagctttttattactctccagactgctgcgcacaaacatcccactacccggaatcgcgtcgtcggtgttaacaatggtggtggtctggtaacgatcgtgcggtaacttcgcacttttaatcgcttcaatcagcgtcgcgtttttctcttttgcagaggtgcgaccagcaatatgttgcagtactcgcacttttcccactaactgcgcgctgttccaggttttgtagctaaactgatctttatcaagcaccaactcgccccgatcggtaatgccaatcggcggcactcgctgaccggtttcgaactgatgtgcggaagccatcatcggcaacagcaggcaggtgagtgccagaatcttgcgtagggtcatggtgtttccttcttatgatatgcaggtgatccgaccacttgggtctgagttttaatcatatgtgctatttatcgaatttcccgcaagtgtgatgccagtttgcggtcaagcgcacaaatcatatgaaaaatgaatgcttatactgaagaccgcgcttcggtaaaaagataattctgaataattgtaacctttaggtaaaaaaagttatacgcggtggaaacattgcccggatagtctatagtcactaagcattaaaatttgcgcctcataatagttgggccgattgtggcaccgcacaggcgtaatactcagcaggagataacaatgaaaattttccaacggtacaacccacttcaggtggcgaagtacgtaaagatcctgttccgtggacggttatacatcaaggacgttggcgcttttgaattcgataagggtaagattcttatcccaaaagtgaaggataagctgcatttgagtgtgatgtccgaagttaaccgtcaggttatgcgtctgcaaacagagatggcttaaccaaagtgctatgcagtaaaaagtgctatgcagtaataagacggctcctgattcaggagccgttgatgtttctgggggttacgcgacgctttcttctttatctttagcgtcaggcagttttgggctaagggcggtggccttgctgtcgatccgggtcaccagcagctggtcgatgcggtagttatcgatatccaccacttcaaatttgtagccggcgaatttcacgctatcggtgcgtttcgggatcttacgcagcataaacatcataaagccgccgatggtttcgtagttgccgctctgcgggaactcgtcaatatccagcacgcgcatgacgtcgtcaattggggtgccgccgtcaatcagccaactgttctcatcacgggcgacaatctgctcttccagcccctgaccgaccagatcgcccatcagcgtggtcatcacgtcattgagggtgatgatccccaccaccagcgcgtactcgttcatgatcaccgcgaagtcttcacctgcggttttaaaactttccaacgcctcactaagggttaacgtatccggcacaatcagcgtgttgcgaatttgtacgccgctgttcagtgccaggctttggttagccagcacgcggttcagcaggtctttagaatcgacataaccgatgatgtggtcaatatcttcattacagacgaggaacttagagtgcggatgttccgccaccttattcttcaggctttgctcatcttcgtggagatcaaaccaaatcacgttttcacgcggtgtcatactagacggaacggtacgggattccagctcaaagacgttttcaatcagctcgtgttcctgtttacgtaacacgcccgccagcgcaccggcttccactaccgcgtagatgtcatcagaagtgatgtcatctttacgtaccattggcagtttgaaaatacggaagattatgttcgccaggccgttgaagaaccacaccagcggggtgcaaacgtacaggcagaagcgcatcgggttgatgatacgcaaagccacagcttctggcgcaatcataccgatgcgtttcggggttaaatccgcaaacaggataaacatgccagtcactaagctgaaagagagaataaagctcagttgctcagagagctctgcgctcatatagcgggagaacaggctgtgaaaagctggagaaaatgccgcatcaccgacgataccgccgagaatcgccactgcgttcagaccgatttggaccacggtaaagaacatgccgggattttcctgcatattcagaacgcgttgggcatttatattgccttcatcagccagcagtttaagtttgattttgcgactggcggcaaggctgatctcggacatgctgaagaacgcacttacagcgatcaagcagagtatgactaaaatactgtttaacatatcttatccgacctttcaggccagatcctcggaaggggaagttgattaatttgtgtgaaatacacattgaaagccgattcgaagaaagtgaaccggcattttcagtggctagtatagcgtaaggtactgtaaagccgccagagggttaaaattcagacagctgaaaaatgcaaaactgcctgatacgctatgccgatcaggcctacgcagtccttgcaatatattgaatttggacgattttgtaggcctggtaagtcgtttacgccgcatcaggcatagacaaagagcactttatcaacaaactacatttgtacccgtaacgttatgcttccggcggcagacagacgccaattccgccaattccacagtaaccatacgggtttttatgcagatattgctggtggtcatcttcggcataataaaacggtgtggcgttagcgatttccgtggtgatgtgacgatcgtcatcggcggcaagcatcgccgcctgaaaacgttccagactggcgcgagctgcggcatcctgttctggggtcagcggataaatcgcactacgatactgcgtgccgtggtcattgccctgacgcattccctgggcgggatcgtgattctcccaaaatacctgtagcaactgctcatagctgatgacggaaggatcgtaaacaatgcgtaccgcttcggcatgacccgtatcaccggagcacacttcccgataagtcggatttggcgtatagccgccggtatagcctgcggcggtgctgtaaacgccgggtaactgccagaacagacgctccacaccccagaaacaacccatcgcaaaaatggcaatctccattccgtcaggtacattggtcatactgtgaccgttgaccgcatgcagcgtggctacgggcatcggggtgttacgtccaggcagggcatcggcgggggaaaccagatgctttttatcaaataaactcatggtgtcgctctcccgaaaatcggtcattggggttaaggttgtaacaagaggcgtatttgcacacaataaccaccgtgaataggtctaaagtaaaacataagaaatatttggggtttagtctgctttttaatccatattactggatttttgttaagccgtttaacggcgttccaggggcaggaaaaaaggatattcaggagaaaatgtgcgctatatccgacagttatgctgtgtaagcttactctgcttaagcggatctgccgtcgccgcgaacgtccgtctacaggtcgaggggttaagcggacagctggaaaagaacgttcgtgcgcagctttctacgattgaaagtgatgaagtgacgccagaccgtcgctttcgcgcacgcgtcgatgatgccatccgcgaaggtctgaaagcgctgggttattaccagccgaccattgaatttgatctccgtccaccgccaaagaaagggcggcaggtattgatcgccaaagtcacgccaggcgtgccggtgttaattggcggcaccgatgtggtattgcgcggcggcgcgcggaccgataaagactatttgaaattgctcgatactcgcccggctattggcacggtactgaaccagggcgattatgaaaatttcaaaaagtccttaaccagcattgcgttgcgtaaaggttatttcgatagcgaatttaccaaagcgcagctgggcattgcgctcggcctgcataaagccttctgggatattgattataacagtggcgaacgttaccgctttgggcatgtgacctttgaaggaagtcaaatccgcgatgaatacctgcaaaatctggtgccgtttaaagagggcgatgagtacgaaagcaaagatctggcagaactgaaccgccgactttctgctaccggctggtttaacagcgtggtggtggctccacaatttgataaagcgcgcgaaacgaaagtattaccattgacgggcgtggttagcccgcgaacagaaaacaccatcgaaaccggggtcggttactctacggacgtgggaccgcgcgtgaaagcgacgtggaaaaagccgtggatgaactcttatggtcacagtctgaccaccagtactagtatttccgcgccggaacagaccctcgacttcagctataaaatgccgctgctgaagaatccactggaacaatattatttggtgcagggcggttttaagcgcactgacctgaacgataccgaatctgactccactacgctggtggcttctcgctactgggatctctccagcggctggcagcgtgccattaacctgcgctggagtctcgaccactttactcagggtgaaattaccaataccacgatgctgttttatcctggggtgatgattagccgcacgcgttctcgtggtggcctgatgccaacctggggcgacagccaacgctactctatcgactactccaacacggcctggggtagtgatgtcgatttctccgttttccaggcgcagaacgtctggatccgcacactgtacgatcgccatcgttttgttacacgcggcacgctgggctggattgaaaccggtgatttcgacaaagtaccgccggatctgcgtttcttcgccgggggcgaccgcagtattcgtggctacaaatacaaatctatcgctccgaaatacgccaacggtgacctgaaaggggccagcaagttgataaccggaagcctggaataccagtacaacgtgaccggaaaatggtggggcgcggtgtttgtcgatagtggcgaagcggtaagcgatattcgccgcagcgactttaaaaccggtaccggggtcggcgtgcgctgggaaagcccggtcgggccaatcaaactcgattttgccgtaccggtcgcggataaagacgaacacgggttacagttttacatcggtctggggccagaattatgagtttatggaaaaaaatcagcctcggcgtggttatcgttatcttactgttgctgggaagcgtggcgtttctggtgggcaccaccagcggcctgcatctggtatttaaagcggcggatcgctgggtgccaggactggatattggcaaggtcaccggcggctggcgcgatctcaccttgtctgacgttcgttatgagcagccaggcgtggcggtaaaagcgggcaatctgcatctggctgtcgggcttgagtgcctgtggaacagcagtgtttgtattaatgatctggcgctgaaagacattcaggtcaacatcgacagtaaaaaaatgcctccttctgaacaggttgaagaagaggaagatagcggtccgctggatctctccacgccgtatcccatcaccctgacacgggtggcactggacaacgtcaacattaagattgatgacaccacggtaagcgtgatggacttcacctccggcctgaactggcaggagaaaaccctgaccctgaaaccgacgagcctgaaaggcctgctgattgctctgccgaaagtggcggaagtggcgcaggaagaagtggtcgaaccgaaaattgaaaatccgcagccggatgaaaagccgctcggcgaaacgctgaaagatctcttttctcgcccggtattgccggaaatgaccgacgtgcatttgccgcttaacctgaacattgaagagtttaagggcgagcagctgcgcgtgacgggcgacacggacatcaccgtgagcaccatgctgctgaaagtgagcagcattgacggcaatactaaactggacgccctggatatcgattccagtcaagggatcgtcaacgccagcggcacggcgcagctgagtgacaactggccggtggacatcactctcaacagtacactgaacgtggagccgttgaaaggtgaaaaagtgaagctgaaaatgggcggcgcgctgcgcgaacagctggagattggcgttaatctttccggtccggtggatatggatttacgcgcccagacgcgactggcggaagccggattgccgctcaacgtggaagtgaacagcaaacagctttactggccgttcactggtgagaagcagtatcaggcggatgatctgaaactgaaacttaccggcaaaatgaccgattacacgctctctatgcgtacggcagtgaagggacaggagatcccgcccgcgactattaccctcgacgccaaaggtaatgaacagcaggtcaatctcgacaaactcaccgtcgcggcgctggaagggaaaactgaactcaaggcgttgctcgactggcaacaggccattagttggcgcggtgagctaacgcttaacggcattaacaccgccaaagagttcccggactggccgagcaaactcaatggcttgattaaaacccgcggtagcctgtacggcggcacctggcagatggacgtgccggagttgaagctgaccggtaacgttaaacagaacaaagtgaacgttgacggcacgctgaaaggcaacagttatatgcagtggatgatcccagggcttcatctggaactcgggccaaacagtgccgaagtgaaaggcgagctgggggtaaaagatctcaatcttgatgccaccatcaacgcgccggggctggataacgcgctgccggggcttggcggtacagcgaaagggctggtgaaagtacgcggcacggtggaagcgccacaactactggcagatatcaccgcgcgcggcctgcgctggcaggaactttccgtggcgcaggttcgcgtggaaggcgatatcaaatccaccgatcagatcgccgggaaactcgacgtacgcgttgagcaaattagccagccggatgtaaatatcaacctcgtcaccctgaatgccaaaggcagcgaaaagcagcacgagctacagttgcggattcagggggagcctgtctccgggcagcttaatctggcaggaagttttgatcgcaaagaagaacgctggaagggaactcttagcaatacccgcttccagacgccggttggcccgtggagcctgacccgcgatattgcgctggattaccgcaataaggagcaaaaaatcagcatcgggccacactgctggcttaacccgaatgcggaactgtgcgtgccgcaaactatcgatgcgggggccgaagggcgtgcggtggtgaatctcaaccgcttcgacctcgccatgctgaaaccgtttatgccagaaaccactcaggccagcggtatcttcacgggtaaagcggacgttgcctgggacaccacgaaagaggggctgccgcagggcagtatcacccttagcgggcgtaacgtgcaggtaacgcaaaccgtcaacgatgcggcgctgcccgtggcgtttcagacactgaatctgacggcggaattgcgtaacaaccgtgccgaattgggctggaccatccgcctgaccaataacggccagtttgatggacaggtgcaggtgaccgatccgcaaggccgccgtaatcttggtggcaacgtcaatatccgtaacttcaaccttgcgatgataaaccccatctttacccgtggggaaaaagcagcggggatggtgagtgccaacttgcgtctgggtggtgatgtgcaaagcccgcagttgtttggtcagcttcaggttacgggtgtggatatcgatggcaactttatgccgtttgatatgcaaccgagccagcttgcggtcaactttaacggtatgcgcagcacgcttgccggtacagtacggacccagcagggtgaaatctacctgaacggtgatgccgactggagccaaattgaaaactggcgggcgcgggtaacggcgaaaggcagtaaagtgcggatcaccgtgccgccgatggtacgaatggatgtaagcccagatgttgtattcgaggctacaccaaacctgtttaccctcgatggtcgcgtggatgtcccttgggcgcgcatcgtggtgcacgatctgccggaaagcgcagtaggcgtctccagcgatgtggtgatgcttaacgataacctgcaaccggaagagccgaaaacggcgagcattccgattaacagtaacctgattgtccacgttggcaacaatgtgcgcattgacgcctttggcctgaaagcgcggctgacgggcgatctcaatgtcgttcaggacaaacaagggctgggtctgaacgggcagatcaacatccctgaagggcgcttccatgcctatggtcaggatctgattgtgcgtaaaggtgagttactgttctctggtccgccagatcaaccgtatcttaatattgaagctattcgtaacccggatgctacagaagacgacgtaatcgccggagttcgcgtcactggtctggcggacgaaccgaaagcggagatcttctctgacccggcgatgagccaacaagctgccttgtcttatttgctacgtggacaagggctggagagcgatcagagcgacagtgcggcaatgaccagcatgctgattggtttgggggttgcgcaaagtggccagattgtgggtaaaatcggcgagacgtttggcgtaagcaatttagcgctcgacacccagggagtaggcgactcctcccaggtagtggtcagcggctatgtattgccaggtctgcaagtgaaatacggcgtgggtatatttgactctatagcaacactcacgttacgttatcgcctgatgcctaagctatatctggaagccgtgtctggtgtagaccaggcactggatttgctctatcagttcgagttttaacaatgcgaatatttgtctacggcagtttacgccacaaacaaggcaacagtcactggatgaccaatgcccagttactgggcgatttcagtatcgataactaccagttgtatagcctgggccactatccaggcgcagttccggggaacggaacggtacacggtgaagtttatcgtattgacaacgccacgctggccgaacttgatgccttgcgcaccaggggcggtgaatacgcgcgccagttgattcagacgccgtacgggagtgcatggatgtacgtttatcaacgacccgtcgatggattaaagctaattgaaagcggcgactggttagacagggataagtaaccatatgcatacgccaccttcgggtggcgttgttttttgcgagacgactcgcattctgttttgtaattccctcaccttttgcttttctctccgagccgctttccatatctattaacgcataaaaaactctgctggcattcacaaatgcgcaggggtaaaacgtttcctgtagcaccgtgagttatactttgtataacttaaggaggtgcagatgcgtattaccataaaaagatgggggaacagtgcaggtatggtcattcccaatatcgtaatgaaagaacttaacttacagccggggcagagcgtggaggcgcaagtgagcaacaatcaactgattctgacacccatctccaggcgctacagccttgatgaactgctggcacagtgtgacatgaacgccgcggaacttagcgagcaggatgtctggggtaaatccacccctgcgggtgacgaaatatggtaaagaaaagtgaatttgaacggggagacattgtgctggttggctttgatccagcaagcggccatgaacagcaaggtgctggtcgacctgcgcttgtgctctccgttcaagcctttaatcaactgggaatgacgctggtggcccccattacgcagggcggaaattttgcccgttatgccggatttagcgttcctttacattgcgaagaaggcgatgtgcacggcgtggtgctggtgaatcaggtgcggatgatggatctacacgcccggctggcaaagcgtattggtctggctgcggatgaggtggtggaagaggcgttattacgcttgcaggcggtggtggaataaggtgtgtttatttatcgcgggcataaaaaaacccttactaaccgaagcccggcgttcagggttattacgccagaagaacttatttattctttgcgcgctcgaaggaggcaacgatttcagctttagcggcttctgcgttttcccaaccttcaactttcacccacttgcctttttcgaggtctttgtagtgctcgaagaagtgagcgatttgcgctttcagcagttcaggcagatcgttaacgtctttaatgtgatcgtattctttgctcagcttgctgtgcggaaccgcaaccagtttcgcatcttcaccggcttcgtcggtcattttcagaacgccaaccggacggcaacggatcacagaacccggctgcagcgggtacggagttgggaccagtacgtcaaccgggtcaccgtccagagacagggtgtggttgatgtaaccgtagttgcatggatagaacatcgcggtggacatgaagcggtcaacgaacagtgcgccgctctctttgtcgatttcgtatttgatcggatctgcgttagccgggatctcaataacaacgtagatgtcttccggcagatctttacccgcagggacgttgagtaagctcatgtctgtttcctttaaaaatatgtggcaaacaagtgccgagtattatagccaactcgcgccgaatgtcttcgcttgttttcgtcttcattttcctttttcaccagttttaagacggtatacagagcaggaaaatccataaccgtagccgcatttttcatagtgagatgaaagcgattacaaacttgtgattaacgttttatttacttttttgaagtgtgatgtaacgcaatctgttacataacgaattgtctatagttttttcgcgaacatcttttaaccaataataactaccccgacgaggacaaccctatgtggaaacgcttacttatagtctctgcagtcagcgcagccatgagctctatggcgttggccgctccattaaccgttggatttagccaggtcggaagcgaaagtggctggcgtgccgcagaaaccaatgtggcgaaaagtgaagccgaaaagcgcggaatcacgttgaaaattgccgatggtcagcaaaagcaggaaaaccagattaaagcggtacgttccttcgttgcacaaggggtggatgcgatctttatcgctccggtggtcgcgacaggttgggaaccggtattaaaagaggcgaaagatgccgaaatcccggtattcttgctcgatcgttccattgatgtgaaagacaaatctctctatatgaccaccgtcactgccgacaacatcctcgaaggcaagttgattggtgactggctggtaaaagaagtgaatggcaaaccatgcaacgtggtggagctgcagggcaccgttggggccagcgtcgccattgaccgtaagaaaggctttgccgaagccattaagaatgcgccaaatatcaaaatcatccgcagccagagtggtgacttcacccgcagtaaaggcaaagaagtcatggagagctttatcaaagcggaaaacaacggcaaaaacatctgcatggtttacgcccataacgacgacatggtgattggtgcaattcaggcaattaaagaagcgggcctgaaaccgggcaaagatatcctcacgggttccattgacggtgtaccggacatctacaaagcgatgatggatggcgaagcgaacgccagtgttgaactgacgccgaatatggcaggtcccgccttcgacgcgctggagaaatacaaaaaagacggcaccatgcctgaaaagctgacgttaaccaaatccaccctttacctgcctgataccgcaaaagaagaattagagaagaagaaaaatatggggtattgagggttgctatgcctgatgccgattcgtaggccggataaggcgctcgcgccgcatccggcgatggtgcactgaagcctgatgcgacgcttaccgcgtcttatcatgcctactgggagcacgctttacaccgggggaaaccatgacgaccgaccaacaccaggagatcctccgcaccgaaggattaagtaaatttttccccggcgtcaaagcgttagacaacgttgatttcagcctgcgccgtggcgaaatcatggcgctgctcggtgaaaacggggcgggaaaaagtacgctaatcaaagcattaactggtgtataccacgccgatcgcggcaccatctggctggaaggccaggctatcagtccgaaaaataccgcccacgcgcaacaactcggcattggcaccgtctatcaggaagtcaacctgctacccaatatgagcgtcgctgataatctatttataggccgcgaacccaaacgcttcggccttctacgccgcaaagagatggaaaagcgcgccaccgaactgatggcatcttacggtttctccctcgacgtgcgcgaaccgctcaaccgctttagtgtcgcgatgcagcaaatcgtcgctatttgtcgggctatcgatctctctgccaaagtgctgatcctcgatgaacccaccgccagtctcgacacccaggaagtggagttactgtttgacctgatgcgtcagttgcgcgatcgcggcgtcagcctgatttttgtcactcactttctcgatcaggtctatcaggtcagcgatcggatcaccgtcttacgcaacggcagtttcgtaggctgtcgggaaacgtgcgagctaccgcagatcgaactggtaaaaatgatgctggggcgcgagctggatacccacgcgctacagcgtgccgggcgaacattgttgagcgacaaacccgttgccgcgttcaaaaattacggcaaaaaaggaacgatcgcaccgtttgatctcgaagtacgccccggcgagatcgtcggtctggctggattgctgggaagtggacgtaccgaaaccgccgaagtgatcttcggtatcaaacctgctgacagcggcacggcgttgatcaaaggcaaaccgcaaaacctgcgaagcccacatcaggctagcgtactgggcattggcttctgcccggaagacaggaaaaccgatggcatcatcgctgccgccagcgtgcgggaaaatatcatcctcgctctccaggcccagcgcggctggctacgtcccatttcccgcaaagaacagcaagagattgccgaacgctttatccgccagcttggcattcgcacacctagtactgaacaaccgattgaatttctctccggcggcaatcagcaaaaagtgttgcttagtcgttggctactgacccgaccgcaatttctgatcctcgatgagccaacccgcggcattgatgttggtgcccacgccgagatcatccgcctgattgaaacgctatgcgccgatggtctggcgctgctggtgatctcctccgaactggaagagctggtgggctatgccgatcgggtgattatcatgcgcgatcgcaaacaggtggcggagatcccgctggcagagctttccgttccggcgatcatgaacgccattgcggcgtaaggagaacagtgtgatgcctcaatctcttccggacaccactacgccaaaaaggcgctttcgctggccgacggggatgccgcagctggtagcactattgctggtgctgctggtcgatagcctggtagccccgcatttctggcaggtggtgcttcaggatgggcgtttgttcggtagccccatagacattcttaaccgtgcagctcccgttgcgttactggcgattggcatgacgctggtgatcgccaccggtgggattgatctctccgtaggggcggtgatggctatcgccggagccacaacggctgcgatgacggtcgcgggattcagcctgccgattgttttgttaagcgccctgggcaccggcatcctggcgggattgtggaacggcatactggtagcgatcctcaaaattcagccgtttgtcgccactctgatcctgatggtcgccgggcgcggcgtggcgcaactgatcaccgccgggcagatcgtcacgtttaacagcccggatctcagttggttcggcagtggaagcctgttgttcctgccaacgccggtcattatcgcggtgctgacgcttatcctgttctggctgttgacccgcaaaacggcgctggggatgtttatcgaagccgttggtatcaacattcgggcggcaaaaaatgccggggtaaacacgcgaatcatcgtcatgctcacttatgtgttgagcgggctgtgtgcggcgattgcgggcattatcgtggcggcggatattcgcggtgccgatgccaacaacgctgggttatggctggagctggacgccattctcgcggtggtgattggcggcggaagcctgatgggcgggcgctttaacctgctacttagcgtggtgggggcgctgattattcaggggatgaacaccggaattttgcttagcggctttccgccagagatgaaccaggtggtgaaagcggtggtggtgctttgcgtgctgattgttcagagccaacgctttatcagtctgattaaaggagtacgtagccgtgataaaacgtaatttgccactgatgatcaccatcggcgtctttgtgttgggttatctttactgcctgacccagtttcccggttttgcttccacaagagtgatctgcaatatcctgaccgataatgcctttcttgggatcattgccgttggcatgacctttgtgatcctcagtggtgggatcgatctctccgtcggtagcgtgatcgcctttactggcgtgtttctggcaaaagtgattggcgatttcggcctcagcccgctgctggcgtttccgctagtgctggtgatgggctgtgccttcggcgcatttatggggcttctgatcgacgccctgaagatcccggcatttatcattacgcttgcggggatgttctttttgcgcggcgtcagctatctcgttagcgaagagagcattccgataaaccatcccatttatgacacgctcagtagccttgcgtggaaaatccctggcggcggtcgcttaagtgcgatgggactgctgatgttggcggtggtggttatcggcatattcctcgcgcatcgtacccgttttggtaatcaggtatacgccattggcggcaacgcaacgagcgcgaatctgatggggatttccactcgcagcaccactattcgcatttatatgctctccaccggactggcaacgctggcggggattgtcttcagcatttatacccaggccggatatgcgctggcgggcgtaggtgtggaactggatgctatcgccagtgtggtaattggcggtacgcttttgagcggtggcgttggaacggtattagggacgctttttggcgtggcgattcagggactgattcagacttacataaactttgatggcacgctgagttcctggtggacgaaaatcgccatcggtattttgttgtttatttttatagcattacagcgtggattaacggtgctgtgggagaatcgtcagagtagcccagtgacaagagtcaacattgcgcagcaataaaaacgcctctccgtgtggagaggcgcaggagattacgcgtccgggaactcacggataaagcgttcgacatcttcaaccatatggtcgttgccgacaaagaaactacggcgctggtgcagggtttccgggatgatatccagaatacgctctttgccatcgctcgctttaccgcccgcttgttccgccaggaatgccatcgggttgcactcatacagcaaacgcagtttgccgtccgggtggctggcggtgcttgggtagagataaataccgcctttcagcaggttacggtggaaatccgcgaccagactaccgatataacgactggtataagggcggttggtggatttatcttcttcctggcagaatttaatgtacttcttcaccccgttcggaaacttaatgtagtttccttcgttgatggagtaggttttgcctttctccgggaagcgcatccgttcctggcacaggcagaaaacgccgaggctaggatcgtaagtaaaggcgtgaacaccgcatccggtggtgtaaaccagcatggtagaggagccgtataccacgtaacctgccgcaacctgtttgttaccaggctggaggaaatcttcttccgttaccggcgtgccaacaggcgtaacgcggcggtagatggagaaaatggtaccgacagagacgttaacatcgatgttggagctgccatccagggggtccatcagcaccacgtattttgcgtgttcacagccttcaaagacgacaatctcatcttcttcttcagaggcaatgcccgcaacgatatcgcgtgctttcagtgcggctttcagtttttcattagcgaacaagtcgagtttctgctgaacctcgccctgcacgttctcagcaccgctggcacccaggatatcaaccagtcctgctttgttgatatcgcgatggataatcttggcgcccagttttattgcgctcagcaaagcagtgagctcaccggtagcatgagaaaactcgtgctgcttttcgacaataaattcacctaacgttttcataaaactttccctgcaatgtttatggagtaaagcgaccgcaacaatcttaacaaataatctcaatgttgcgctcaggtgaatcgcgccagcaaattacggattatcctgaaatgcgtttctcacttgcccgacatatgcgtaaaatgagcggcagattaaaaaaggatagtgacgtatgcgcattcatattttaggaatttgtggcacatttatgggcggtctggcgatgctggcgcgccagttaggccatgaagtaacgggtagcgacgccaatgtgtatccgccgatgagcaccttacttgagaagcaaggcattgagctgattcaggggtacgatgccagccagctcgagccgcagccggatctggtgattattggcaacgccatgacccgtggaaatccgtgtgtggaagcggtactggaaaaaaatatcccttatatgagtggtccacagtggctgcacgattttgtgctgcgcgaccgctgggtgctggccgttgccggtacacacggcaaaaccaccaccgcgggaatggcgacctggattctggaacagtgtggttacaaaccgggctttgtaatcggcggtgtgccggggaactttgaggttagcgctcatctgggcgaaagcgacttctttgttatcgaagcggatgagtatgactgcgccttcttcgacaaacgctctaaatttgttcattactgcccgcgtacgctgatcctcaacaaccttgagttcgatcacgccgatatctttgacgacctgaaagcgatccagaaacagttccaccatctggtgcgtatcgttccggggcagggccgtattatctggccggaaaatgacatcaacctgaaacagaccatggcgatgggctgctggagcgagcaggagctggtgggtgagcagggtcactggcaggcgaaaaagctgaccaccgatgcttccgaatgggaagttttgctggatggcgaaaaagtgggcgaagtgaaatggagcctggtaggcgaacataatatgcacaatggcctgatggcgattgcagcggctcgccatgttggtgtagcgccggcagatgccgctaacgcgctgggtagctttattaatgctcgtcgccgtctggagttgcgtggtgaagcgaatggcgtcacggtatatgacgattttgcccatcacccgacggcgattctggcaacgctggcggcgctgcgtggcaaagttggtggtacggcgcgcattattgctgtgctggagccgcgcagcaataccatgaaaatggggatctgcaaagacgatctggcacctagtttaggtcgtgccgatgaagtcttcctgctgcaaccggcgcatattccgtggcaggtggcagaagtggcagaagcctgcgttcagcctgcacactggagtggcgatgtggatacgctggcagatatggtggtgaaaaccgctcagcctggcgaccatattctggtgatgagcaacggcggttttggtgggatccatcagaaactgctggatgggctggcgaagaaggcggaagccgcgcagtaattcggccttagccagatatagtatgcgtaggccggataaggcgttcacgccgcatccggcatttgagcatagtgcctgatgcgacgcttgatgcgtcttatcaggcctacaggtgcaccgtatccggcaaaccatactcacatcaacaacgaaaattacccttcgttctccgctaactcgcgcagatactggaaaatctggcgtgcggatttcggcggcttattcccttctttctctttcttcgcgttgcggatcagagtacgcagttgctgacgatcggcatcgggccacagatttaatacctcagcgatggcgtcatcaccttgatcgatcagacgatcgcgcaggttttccagtttatggaacagcaccacctgctggttgtgacggtttttcagcttatccagcgcctgacgaataggctctacgtcgcgctggcgcagcatcttaccgatgagctgcaactggcggcggcgaccttccatcttaatacgctgggcgagctcaatagccgcgcgcagatccgcatctaacgggatcttatccagcgcgtttttccccagatcaacaatttccgcgccaaggcgttttagctcctcggcatcacgtttaatttcacttttactgacccagataatttcatcgtcttcgtcttcgatgtcatcaccgggaacgtcgtcgagccagtcttcgggctgcttagtcatctcaggctccttaaaaaaagaggctaatgttaccagttaagatgcgcactgaaaaacggttctctgttagacttcagagaaactctctacattatggcacttgcaatgaaagtaatctctcaagttgaagcgcagcgcaagattctggaagaagcagtttccactgcgctggagttggccagtggcaaaagcgacggtgcggaagttgccgtcagcaagaccaccggcattagcgtaagcacgcgttatggtgaagtggagaatgttgaattcaatagcgatggcgcgctggggatcactgtttatcaccagaaccgcaaaggtagcgcaagttccaccgatttaagcccgcaggccattgcccgtactgtacaggcggcgctggatattgcccgttataccagcccagatccctgtgccggcgtggcagacaaagagctgctggcctttgacgcaccagatctcgacttgttccaccctgcggaagtttccccggatgaagccattgaactggcggcccgcgcagaacaggcggcattgcaggcggacaaacgcatcaccaataccgaaggtggcagctttaacagccactacggtgtcaaagtttttggcaacagccacggcatgttgcagggttactgcagtacgcgtcatagcctctccagctgtgtaattgccgaagaaaatggcgatatggagcgtgattacgcctacaccattggtcgtgcgatgagcgatctgcaaacgccagagtgggttggggccgactgtgctcgccgtactttaagccgtctgagtccgcgtaaactctccaccatgaaagcgccagtcatttttgccaatgaagtggcaaccgggctttttgggcatctggtgggggcgatagcgggtggaagcgtttatcgtaaatctaccttcctgctggatagcctgggtaaacaaattctgccggactggctgaccattgaagagcatccgcatctgctgaaagggctggcgagcacgccattcgacagcgaaggtgtgcgcaccgagcgtcgcgatattattaaagatggcatcctgactcagtggctgctgaccagctacagcgcgcggaaactggggctgaaaagcaccggacatgcgggcggtattcacaactggcggattgccggacaaggtctaagcttcgagcagatgctcaaagagatgggcaccgggctggtggtgacggaattgatgggccagggcgtgagtgccattaccggtgattattcccgtggtgcagcgggcttctgggtagagaatggcgaaattcagtatccggtgagcgaaatcaccatcgcaggtaatttaaaagatatgtggcgcaatattgtcaccgtcggtaacgatattgaaacacgcagtaatatacagtgtggttctgtgctgttgccggagatgaaaatcgccggacagtaaaaaaactggcgcgacctgccgcgctataaactaaaaaattacacaaaatcattcgcactgcatcgagacggaaagtgaatgagggccggggagcgtactcgcagtacgtgacccggtcgaatgagcgtagtcgtcgatgaggcagtgtgaaggatgaagtgtaaataaaaaaggaactattcttgcagtctcctcgttggtattcagttcggcgtcatttgctgctgatctcgaagacaatatggaaaccctcaacgacaatttaaaagtggtcgaaaaagccgataacgcggcgcaagtcaaagacgcgttaacgaagatgcgcgccgcagcgctggatgcgcaaaaagcaacgccgccgaagctcgaagataaaagtccggacagcccggaaatgaaagatttccgccacggtttcgacattctggtcggtcagattgacgacgcgctgaagctggcaaatgaaggtaaagtaaaagaagcgcaggctgctgcagagcaactgaaaacgacccgcaatagttatcacaagaagtatcgttaattcctcatttccctgttgcctgcactcaggtaacagggaacttatcatcgcaaatgatgcaccacctgattgctgctgccgcgccagatcagggaagggtcttttaaatcctgcacaaatttgccgtcgaccagcacgttaatcaaatcaacaacctgcatttgcgcagcgttgagttcgtcgagtttatagcctgtccacacccagatgtctttacccggacactcggcgcggatgcgttgtaccagtttcagaatatccggcacgttttgcggatgcagcggatcgccgccggagagggaaataccctggcgtttgatacgagtgtcattcagatcgttaatgatctggtcttccattgctttggtaaatggctgaccggaatttacccgccatgtgcttttgttatagcaaccggggcattcatgaacacacccggagacaaacagggtgcaacgagtgccggggccgttgacgatgtcgacaggatagtactgatgataattcattatttcgcctggcttatcagtccgcgtgtaggctgcatccggtaatcaatgcctgatgcgacgctgtcgcgtcttatcagacctggagcaattgccaaatgtaggccggataaggcgtttacgccgcatccggcatttgcttagctcagagtgaagattaacctatctgcccattccccaaatgtttaacgcggcgcttaacttcttcctgcttaccagcgttaaacggacgtgcatccgggctacctaaatatccgcacacgcggcgagttacgctcacacgggaggcgtcatggttaccacatttcgggcaagtgaagcctttgctggtgcactcgaactcaccggtaaagccacactcgtagcactcatcaatcggtgtattggtgccgtaatacggtacatgctgatagctgtaatcccagacatcttccagcgccttcaggttgtgctgaatgtttggatactcgccgtagcaaatgaaaccaccgttcgccagcggcgggtaaggcgcttcaaagtcgatcttgtcgtacgggttcaccttcttctccacatcgaggtggaaactgttggtgtagtaacctttatcggtcacgcccggcaccacgccaaactcagcagtatcgagacggcagaagcgatcgcacaggttttcactcggcgtgctgtagagactgaaaccataacccgtttcttctttccactgatccactgcctgacgcagacgttcaacaatggcgatacctttcgcgcgaagctgctcgttgtcgtaaacatgctcgccgccgaacagcgcgttaatggtttcgtggatgccgatgtaacccaggctaatagacgcacgaccgtttttgaagatttcagaaacatcatcgtcagcattgagacgcacgccacaagcaccttccatatagaggatcggggccacgcgcgctttcacgccttcgagacgagcgatacgggtcatcagcgccttacgtgccagcaccagacgttcatccagcagcttccagaaggtggcttcatcgccttttgcttccagagcaatacgcggcaggttcaggctgatcacgccgaggttgttacgaccatcgtggatctgctcgccgttttcattttcccacacgccgaggaagctgcggcagcccatcggagttttaaagctaccggtgactttcactacctgatcgtagttcaggatatccggatacatgcgcttgcttgcgcactccagcgccagctgtttgatgtcgtagttcggatcgccttttttatggttcaggccatcgcgaatcgcaaacaccagtttcgggaacaccgcagttttacggtttttaccgaggcctgcgatacggttacgcaggatgctttcctgaatcaggcggctttcccagctggtgcccaggccaaaaccaaaggttacaaacggcgtctgaccgttggcggtgtgcagggtgtttacttcgtactccagactctggaaggcatcgtagcactctttgatggttcgagagttagcgtagccttcggcgtccgggatgttccactcttctgcggtcttgcgatgtttgttgtagctggcagtgacaaacggtgccagcacttcatcgatacggttaatggtggtgccgccataaatatggctggcaacctgagcaataatctgcgcagttaccgcggttgccgtagagatgctcttcggcggttcaatctcggcgttccccattttaaagccctgggtcagcatgcctttcaggtcgatcaacatgcagttgaacatcgggaagaacggactgtaatcgagatcgtgatagtgaatatcgccacgctcatgtgcctgcaccacgtcacgcggcagcaggtgctgacgtgcatagtgtttagccacgatcccggccagcaggtcgcgctgggttggaatcaccttgctgtctttgttggcgttttcgttgagtaagctggcgttggtctgctcgaccagaccacggatctcctggttcaggcgaccgcgtttttcacgttcaatgtcgcgatcgtgacggtactcgatgtaagcacgagccagttgtttgtatggaccactcatcagctgattttcaactgcggtctggatctcattgatatccacctggttgcggccctgcatctgctcgctgacaaccgcggcaacagtggcgcaataatcggcatcatcgacttccgctgctttagctgcacgcagaatcgcttctttgatgcgctcacttttaaacggcactttgcagccgtctcgtttcatcacatgcggtgtcatgatcgctccatatttttaagaacaggttatccacagaaattgggaaaggcgttttccggttttttcgtttcgttttccggtgctttccgcaatcgccatccgcttatccacaacgccgcacctttttcgtggggagctgtagtagcaattatagtcgattaatacaacatattgggttgggacgcattttaaagtctatatatagtgctttgcatcaaggatgtttgagctttttttgatgtagctcaaagtaaaaagcagagcgtacggatgacgggcgctacagcgatatgtaaattttttaatgaatttgctggttgaaaaatcaacaaaaacaacatactgacagacaaaaccccggaatgaccggcattaccggggcttagggaagatttacttctgtaaccaccagacagcctcaaaaggccgtaaattcatggcacagggttgtggactggcttcttcgtagttatgcatcacaagctgccagttgccgcgcatttgccctgcctgccagggttggatctcacggctaaggttggcaatgaccagcaaggtttgccccttccattcacggcgatagcaccacaatacagggctgtttggcagcagatcctggtaattgccccatgtcaggatggcttcctgcttacgcagtgcgattaacttttggtaggtgtaaaacacgctggaatcatcggccagcgcggcttctacgttgatttgttgatagttatcgcccaggccaatccacggttcgccagccgtaaacccggcattatcgccgttgctccattgcatgggcgtgcgactgttgtcacgggatttactggcgaggattgccaataactcgtcggcatcacgcccatcgttgcgcagctcggcaaacatattgaggctctctacgtcgcgatagtcagtaatgcgcgtgaaatgcgggttggtcatgccaatctcttcgccctggtagatatacggcgttccctgcatgccatgcagcaccatcgccagcatttttgccgcaggcacgcggtattcaccttcatcaccaaagcgagaaacaatgcgcggctgatcgtggttacaccagaacaaggcattccatgctacgttgtgcattccttgttgccagtggcggaacaatgttttcaacgccacaaagtcaggtttagccagcgtccatttttcaccaccgggataatcgaccttcaggtgatgaaaattaaaggtcatgctcaattcactgcctgtcagagccgcgtatcgctggcaatgctcaaggctggtggaggacatttcacctacggtcattaacccgcgtggcgtaaacacatcgcggttcatctcgtgcaaaaactcgtgtgctcgtggcccgtcggtgtagaagcgacgcccgtcgccgtccaggtcttcagggaaacgcgggtctttggagatcagattcaccacatccaggcgcaacccgtcgaccccacgatcggcccagaactcacagacttttttcagctctgcgcgtaccgctggattctcccagttgagatccgcctgttctggtgcaaagagatgcaaatagtactgttcgctttccgcatgccagcgccacgcactaccgccaaatttactacgccagttgttcggtggcgtttctggttctccatcgcgccagatataaaactggcggtaagggctttctttgttcagcgcctcgcgaaaccaggcatgttgggtagaggtatggttaaacaccatatcgagaatgatacgaatcccgcggctttttgcctgcgtcaccagttcgtcaaaatcgtccagcgtgccgtaggtgggatcaatcgccgtatagttcgctacgtcgtaaccgttatcgacctggggagagacataaaagggggttagccagatggcatcaacgcccagtttatgcagatagtccaggtgttggataacgccacgtaaatcgccggtaccgctacccgtggtgtcctgaaaactctttggataaatctggtagataacgccgttttgccaccagtggggaagatgagtcattacgttattcctgcgaatgcgagggggcgcaattgcgccccgaagaaaattaaacaatgtccagcgtgcccaggcggtatttccgctgatagataaagctggtgagtacaatcgggatgatgatggcgatagccattgccagcgcaaacacctgccagtagctcggttgaatgctgagaattcccggcaggccgcctacgccgatgccattcgccataacgccgttcaggccgcatagcaatcctgccagaccagaaccaatcatcgcgcacagcatcgggaagcgatatttcaggttgatgccgtacattgcaggctcagtgaccccaagccaggcggagatagcggcaggcacggagatctcgcgttcattgtgcttgcggctggaaatgataatgcctatcacggcggagccctgagcgatattgctcagcgcaatcagcggccacactggcgtaccacccatgctttgaatcatctgcaaatcaatagcaagcgtggtctggtgtacaccggtgatcaccagcggggcgtacaggaagccaaacaatgctgcgccaatcggagcaaagctgccggtcatcaggtgacgtaccgcaaaggcaacgccatcgccaatcatgcgaccaaacggaccaatcagcgcatgggcgaggaacaccgcgaggatcaggctacagacgggtaccaccaccagatagaggtaatccggcacgatgcgtttaaggcgagtttcaataacgcccagcgccagtccggctaacagtgccgggatcacctgcgcctgatagcctactttggcgatgctgaacatgccaaagtcccacacttccggcagctgctgcccgagcagataagcgttcatcagctgtggagaaaccagtgtcacgccaagcacgataccaaggatcggcgtgccgcccatttttttcaccgcactccagcaaataccgaccggcaggtagaagaagatcgcttcaccgatcaaccacagaaaatcgtagatcgtttgcagggaagggtacatttgcgccagcgtctgaccgttgctcatgggcaaatcgccgatcacattgcgaaaaccgaggatcaaaccgccgctaatcaacgcgggcagcaacgggaagaagatcaccgcgaaatgagagatcaactgctcatgccatttcatattatgccgggcggctttttttacctgctctttatcaacctgcgcctgtccggtactcgcaatcagtgcttgatagtaatcacccacgttggtgccaatcaccacctgaaattgcccggcattggtgaaacagcctttcaccatagggagttgctcaatttctttcggtctggcattggccggttggttgaggacaaagcgtaggcgagtaatacagtggctcaccgtcgcaatattgccgcgcccgccgaccagttcaatcaaccgatcgatatccgtttggtttattttgctcatcataaagccccatggcagatgacatttttggttggctgcagaatatattgcgcggaaaaatttaaaaacgggaacgttcccgaaacgcagcgaagatcacaatttatcgttcaggaaacgatcaggacagggtggcggggatgatgatttgttgcggttcgctgcgcccggttacctgcgcgatcaactggcaagccgcctggcgtccagcttcggcgtaaccgggatctacggttacgatctccggatggaggaatttcattaacggcgtattaccgacgctcgccagttgcaaggtgtcgatgcgttgctcttgcaggtatttacttgcgccaagtgccagcgtgtcggttgcgcacagtaaggcggtagtttcaggcgtaatcacttttgcaacgttctcatagccttgcttcatagcaagccctggcagggcggcaacgggatgcagtttatgcgctttgcagaacgccaggtaggcttcgtgacgtcgcttaccggttgtcacgtcactgtgcggcacgccgagataactgatattacgatgcccctggtcatacagccgttgcatcaggattttgattgccccttcgtcgtcataacagacgctagcaaagccttttgcgtcacgcgccagcagaaccaggctactctgccagtgggctaacatttcttctgttatgccagtaaaaccgaacagcactacgccgtcgatattacgccgtttcagcactcccaaatgttcggcaactaattgcggggaaaactgactttccatcatgattgggtcgtaaccttgttcatagaacgctggcagcatggtttgaacggcgagattttcactcaagctatccagacgggtaacaatgatggcgaccactttatcgctttgcccacgcatagcgcgcgcagagcgggaaggggaaaatccatgctgattcatcactgcttcaacacgctcgcgggtgagctggctcacgccgctttcgttattcagcacccgggaaactgtagatttccccacgccgcttaagcgcgcgatatctttgatggtcagccgattttgcatcctgttgtcctgtaacgtgttgtttaattatttgagcctaacgttacccgtgcattcagcaatgggtaaagtctggtttatcgttggtttagttgtcagcaggtattatatcgccatagatgctacgaatattattggattctccttattatttgcggcgcttttttcacttaccggaggttatatggaacctgatcccacgcctctccctcgacggagattaaaacttttccggtaagcccgtcttttcacggcgttaccggatgcgtaaggccgtgacgttttaacgtccctgctcagctttattaccttcaggtaaggcttcgccacgcctgaagacatttctgtactgtttcagacagtgcggagggactccttatgtttaaagaaatttttacccggctcattcgccatttaccttcccgtctggttcatcgtgatccattgcctggcgcgcagcagacagtgaatacggtggtcccgccgtccttaagtgcgcattgcctgaaaatggcggtgatgcccgaagaagaattgtggaaaacgttcgacacccatccggaagggttaaatcaggcggaagtggaatctgcccgcgaacaacatggtgaaaataaattacccgcacaacaaccgagcccgtggtgggtacatttatgggtctgctatcgcaacccctttaatattttactcaccattctcggcgctatttcttacgccacggaagatttatttgctgcgggcgttatcgcgctaatggtcgctatttctacgttgctgaactttattcaggaagcacgttccactaaagcggcagatgccctgaaagcgatggtcagcaatactgcgacggtgctgcgcgtaattaacgacaaaggcgaaaatggctggctggagatcccgatcgaccagctggtgcccggcgatattataaaactggcggcgggagatatgatcccggcagatttacgtatcttgcaggcgcgggatctgttcgtcgctcaggcgagcttaaccggtgagtctctgcccgtagaaaaagccgctaccactcgccagccggagcacagcaatccgctggagtgcgacacgctgtgttttatgggcaccaccgtggtgagcggcacggcacaagcaatggtgattgctacaggtgccaatacctggtttggtcaactggcggggcgtgttagtgagcaggaaagcgagccgaatgcctttcagcaagggatcagccgcgtcagtatgctgctgattcgctttatgctggtgatggcaccggtggtgctgttaatcaatggttacaccaaaggcgactggtgggaagcggcgctgtttgcgcttagcgtcgcggtaggcctaacgccggaaatgttgccgatgattgttaccagcacgctggcgcgcggcgcagtaaagctgagcaaacagaaagtgatcgtcaaacatctggatgctattcagaactttggcgcaatggatattctgtgcactgataaaaccggcaccctgacgcaggataaaattgtgctggagaatcataccgatatctccggtaaaaccagcgaacgcgtgctgcatagcgcgtggttgaacagtcattatcagaccggacttaaaaacctgctcgatacagcggtgctcgaaggtacggatgaagagagtgcgcgcagcctggccagtcgttggcaaaaaattgatgagattccgtttgatttcgagcgtcgccggatgagcgtggtagtggcagaaaataccgagcaccatcagctggtttgcaaaggtgcattgcaggaaatcctcaatgtgtgtagccaggtgcgtcacaatggcgagattgtgccgctcgatgacatcatgctgcgtaagattaagcgggttactgatacgctgaatcgtcaggggctgcgcgtggttgcggtggcgacgaaatacctgccagcgcgtgaaggagattaccagcgggcggatgaatccgacctgatcctcgaaggatatattgcttttcttgatccgccaaaagagacaaccgctccggcactgaaggcattaaaagcgagtggaattaccgtaaaaatccttactggcgacagtgagttagttgcagcgaaagtgtgccatgaagtggggctggacgcgggagaggtggtcattggtagtgatattgaaacgctatctgacgacgaactggcaaatcttgcacagcgtaccacgctgtttgcccgcctgacgccgatgcataaagaacgcattgtgaccttactgaagcgcgaagggcatgtggttggctttatgggcgatggtattaatgatgcgcccgccttacgcgctgcggatatcggcatttctgtggacggcgcggtagatattgcccgtgaagcggctgatatcatcctgctggaaaaaagcctgatggtgctggaagagggggttattgagggacgtcgcactttcgccaacatgctgaaatacatcaaaatgacggcgagctctaacttcggtaatgtgttcagcgtgctggtagcgagtgctttcttgcccttcctgccgatgttgccgttacacttgcttattcagaacctgctgtacgatgtgagtcaggtggcgatcccgtttgataacgtcgacgacgagcaaattcaaaagccgcagcgttggaatccggcggatctggggcgctttatgatcttcttcggaccgatcagcagcatcttcgatattttgacgttttgcctgatgtggtgggtattccatgccaacacgccggaaacgcaaacgctgttccagagcggatggtttgtggtgggcttactgagccaaacgctgattgtgcatatgatccgcacccgccgtgtgccgtttattcagagctgtgcaagctggccgttaatgatcatgaccgtgatcgtgatgattgtcgggatcgcattgccgtttagtccgctggccagttatctgcaattacaggcgctgccgttaagctatttcccgtggctggttgcgattctggcagggtatatgacattaacccagttggtgaaagggttctatagccgtcgttacggctggcaataaagaataaactgggcacgatagccccgattcagattgtagacaaagtgagttttgttcatgccggatgcggcgtaaatgccttatccggccaacaaattcaataaattgcaggaatcacgtaggcctgataagcgtagcgcatcaggcgattttgcgtttgtcatcagacttaatccgggcatgatagcccggatttccatcaagattagcgacgaacagcgatcgcttcgatctcaatcttcacgtctttcggcagacgggcaacttcaacgcaagaacgtgccgggaaggtggcgttgtgttcggtgaagaaggcttcgtaagtggcgtttacggttgcgaagtcgttcagatcttttacaaacacggtagttttaacgatgtcgcccactttcaggccagcggcttcgacgatcgcttttacgttatccaggctctgacgtgcctgtgcagcgacgtctgccggtacttcgcccgttttcggatttaccgggatctgaccggaggtgatgatcatattgcccagatcaacgccctgtacgtaaggaccgatagctgccggtgcattttccgtcgcgatagttttgctcatgatttctcctttattacagcggtaaaaagtctggctcattatagggagccagacttttattaccaaccgcaattaattggccagcaccacattatgggaaaactctttttcacagtatttgcatttgagcgcgatatcattggcgcgttttcgcacggcaaagctggaactaaccggttcggcatggctgatacagttgctgttcgggcagaccagcacattgtcgatgcgctccggcagacttgggcggcttttacccaccacttcatagttgtcgatacggttaaccgtggcttgcggcgcatacaatgccagttgatctacttgatcttcactcaaaaaggtattttcgattttgatcagatctttgcggcccatctcgccagaaggcaggttcagaccaatggtgatgcgctgatccgtttcggtcagcttgaacagactcaacagcttaaaaccgatctgggcggggatatggtcaattaccgtgccgcgtttaatagcttcaacctgcaatttattatcgtgtgtcatctctatttccccttacagtaccagatcgcgattcagaaccagtgccagtaacgcctggcgagcgaaaatcccgttgcctgcctgctggaagtaccaggcgtgtggcgttttatcaacatccgtcgcaatctcatcaacacgcggcagcggatgcagcactttcatattggctttggcgttgtggagatcgctggcgcgaagaacaaactgcgctttcacgttggcgtactcggacgggtccagacgctctttttgcacgcgggtcatgtacaggatgtctacttccgccatcacttcttcaatagagctgtgcagactccatgcgatccctttttcatcgagcatatccagaatgtattgcggcattgccagcgcgtccggcgcgatgaagtaaaaacggttgccgtcgaacttcgctaacgcctgagtcagggagtgaacggtgcggccatatttcaggtcaccaaccattgcgacgtggagattgtccagacgcccctgggtttcctgaatagtgaataagtccagcaaggtttgcgtcggatgttggttggagccatcaccggcattcagtaccggtacattgccggaaaactcggtggccaggcgcgccgcaccttcctgcggatgacgcatcactatcgcatcgacgtaagtgctgataacgctaatggtatcggccagcgtttcgccctttttacccagacttgtattggcgctgtcggagaagcccaccacgctggcccccaggcggtgcatagatgtttcgaaagagaggcgggtacgggtagaggcttcgaagaaacagctggcaatgactttgtgcttcaacagctctggttgcgggtttgctttcagtttcgccgctgtcgccagcaccagattaaggtcatcgcgactaaggtcgtttatggaaatgatatgtttctgatatagcggattagccatcttttatctcctgacgcctgggcaaaaaaaagcccctcgattgaggggctgggaatgggtgatcaacgggaagaaaaacggcaggccagcgtcttttttcagacgcggtaagacaaaatgtcgaacacactgaaccatacatcctcccggcaaattgtccggcattatactcatcgtcagaagcggcgcaagcatttgatgcaatattttgtcagcgcaaacggtttatttgaattaaaagtcaaggtatatgcatttttatttgatgtgattctgcaggggaactgtccttcggtatcaataattgcagacattccctgctttttcctttttcactttcacgcaatcagatatgcattttattccattcatccgacttatagggcggagtgtgaaagcgaacggctaacactattgcttactgctcagggatgcgcgctatcactttaatttcaaaatcaaagcctgccagccatgtaacacccaccgccgtccagtttggataaggtggggcgctaaatatttcatttttcaccgtcatgatgtcttcaaattggttttctggatcggtatggaagctcgtaacatcaatgatatcgtcaaaagtgcatcccgcagctgccagggtcgcatgcaaattatcaaatgccagtctgacttgttgctgaaaatcgggttctggtgttccgtcctctcgacttcctacttgcccggaaacaaacagcaaatcgccggaacgaatagccgcagaataacgatgctcagcatatagactatgtcggccagcagggaaaacagcggttctttctaccatttggttatcctcaagatttacgacatgaacagaagatttctctttaccgggagccgcttttagcggacgacgtgagtaaacaaaacccagacatcatggataatggctgggcttaattgagcgtagtcggttatgcgccaaacgcgccatcaatggtatgcatcgcgccggtaacaaaactggcttctggccctgctaaccatgcgaccataccagcgacctcttccggttgcccatgtcttttgatagccatcaaactatgcaacatatcgcgcattggcccgttggcgggattagcgtcggtatcaattggccctggctggacgacgttaatggtgatcccacgcggtccaaaatcacgggccagcccgcgcgccatgccttgcagggcagatttgctggcggcataagcagccatgcctgcaacaggcatacgatcgccattcacggagccgatgattaagatgcgcccgccttcgggcatctgccgggcggcttcaacagaggcatgataaggagcatgaatattgattttgaaaaggcgatcaatatcgtcggcatttaattccagggcctcgccaaagacgccaatacctgcatttaccaccaggatatccaatgcgccgctcttacgaacgacatcaatgacagcgtctctgtcagcactatctgtgaatactgctgtcgctccagtctcttgtgccaggcgtttagcggcatctttgctccccgcataggtgaatcgtacattggccccatcggtgacgaaacgacgtacgatagcggcaccgataccacgactgccaccgaggatgagaactgtcttacctgtaaaagcgcccataaggactccttgatttattatgtaacatgcattacaaaactgttttaactttctgtcaacaggttttgtaatggtcactaaaaaacaatctcgcgttccaggtcgtcccagacgtttcgctcctgagcaggcaatctctgcggcaaaagtgctttttcaccaaaaaggtttcgatgctgtcagtgttgctgaagttactgattatcttggtattaaccccccgagcctctacgcggcttttggcagtaaagctgggttatttagccgtgtactcaatgaatacgtcggtacggaagctattccgcttgccgatattcttcgtgatgatcgtccggtaggcgagtgcctggttgaggtattaaaagaagcggcgcgcagatatagccaaaacggcggctgcgctggctgtatggttcttgaaggtattcatagtcatgatccacaagcgcgtgatattgccgttcaatattatcacgccgcagaaacgaccatttatgactacatcgccaggcggcatccacaacgcgcacaatgtgtgactgattttatgagtaccgtgatgtctgggctttctgcgaaggcacgagaggggcactctatagaacaactctgtgcaacagctgcaatggcgggggaagcgataaaaactattcttgaggagtgatgcgggccttgacccgaaaggcgggaaagcgcctgccgataagttgtgataagacaataattcacgcgttaaggctagcggaattgattatcttttcgtataacgatagaaatgaaacgttgttttaattaaggagtggaaaagatgatcatcggaaatattcataatcttcagccgtggctaccccaggagttacgccaggcgattgagcatatcaaagcacacgttacggcagaaacgccaaagggcaagcacgatatcgaaggcaatcgactgttttatcttatcagcgaagatatgaccgagccgtacgaagctcgccgtgcggagtaccatgcccgctatcttgacattcagattgtgttaaaaggtcaggaaggcatgaccttcagcacgcaacctgcaggcgcgccggataccgactggttagctgataaagacatcgcatttttgccggaaggcgttgatgagaaaacagttattctaaatgaaggtgattttgttgtgttttatccgggggaagtgcataaaccgctgtgcgcagtgggcgcgccagcccaggttcgcaaagcagtagtgaagatgctgatggcgtgatgacttttcgccgtaaataactcaaggtttacggcgagtttgtgaaaagagcgttttttgatatttttttgtgagtaaaatttgtaatgcttagacgttcttattcactcaaggagttcgtcatgagcaaaataagtgatttaaattattctcaacacattacattagccgacaattttaaacaaaaaagtgaagttttaaatacctggcgtgttggaatgaatgattttgcccgtattgccggggggcaggataacagaaggaatattctttctcctggagcatttttagagtttttggcaaagatatttaccctgggttatgtggattttagcaaacgctccaacgaagcgggtagaaatatgatggctcatattaagtccagttcttattctaaagatactaatggcaatgaaaaaatgaagttttacatgaataatcctgtaggggaacgagcggatagtcccaaggtgattatagaaattagtctttccactatcactactatggggactcgtcaaggacatacagccattatatttccacaacctgatggtagcactaaccgttatgaagggaagtcctttgaaagaaaagatgagagtagtttacacctgattactaacaaggttctggcgtgttaccaaagtgaagctaacaagaaaatagcgcgtctattaaataataatcaggagttaaataatctacagaaattaaataatctacagaagttaaataatctactgaagttaaataatatacaggggttaaataatcctcaggagttaaataatccgcagaatttaaatgattctcaggagttaaataacagccaggaattaaatagtccacaggagttaaatgatccgcaggagttaaataattctcaggacttaaataactctaaggtgagttgtacagttagtgttgattctacgattacgggtttattaaaagaaccattgaataatgcattattagcaataaggaacgaacatctgctattaatgcctcatgtatgtgatgaaagcattagttacttactgggcgaaaaaggtatacttgaagaaatagataagctctacgcattaaatgatcacggaattgataatgacaaagtaggtaacaatgaaattaatgacatcaaagttaacctgtctcatattcttattgattccttagatgatgcaaaggttaaccttacaccggtcatcgatagcattctggagacttttagtaaatccccatatattaatgatgtaagaatactggattggtgttttaataaaagcatgcaatattttgatgatactaaaaagataaagcatgcatgctccgtaataaatcatattaatcttcgcagcgatcagtctaaaatagctgagacattatttttcaatctcgataaagaaccctataaaaatagccctgaattacaggggttgatttggaataagttggttgtatatgtcaatgaatttaacttaagtaatcgagaaaaaacaaatttaatacaaaggctatttgataatgttgagtctatatttaatgaagtacctgtcagcattttagtgaatgatatttttatgaatgatttctttatgaaaaatcctgagatgattaattggtacttccctcagttacttaagagttatgagggtgaaaagatttattttgataatttaaaatatgatttaaatgataatgataaggaatctaataaagaaattttgaagaatcaaccagataatgttatcaaagaaaaactgaataatgaatacaaacttagatttagaatgatgcaaactatcttgcaaagcagagttaatgtattaccatatattaatgaacagcgtttaaataaactaaatccaccggaaaatttacgtatagcaatagaacactttgggtggaagaatagacctatcactgcataaaataatgtgatgccgggatggtttgtatttcccggcatctttatagcgatagcaattatttactgagcgtcgcgaccatcaccgctttgatagtatgcatacggttttccgcctgatcaaaaacaatgctggcggcagattcgaagacctcatcagtgacttccataccgccatgtaggccaaattcttccgccattttcttgccaagcgtcgtttggtcgtcatgaaacgcgggcaggcagtggaggaatttgacctccgggttaccggtcaactgcatcatcttgctgttcacctgatattcacgcagcaatgcaatccgttccgcccatttctcttttgcttcccccatgctcacccacacatcggtatagataaagtcagcaccttcaactcccttcgcgacatcttcagtcagcgtaatattcccaccattttgctgtgccagggcgcggcattccgtaaccagcgcagcttccggccagcacgcttgtggcgcgaccagacgcaaatccagaccggtaagcgccgcagcttcgagcatgctattgcccatgttgttacgcgcgtcacctgcatagaccagcgtcatttcgttgaacgctttgccgggcaaatgctcctgcatggtgagaagatccgccagcagctgcgtgggatggaactcattggtcaggccattccataccggcacgctagcgtattccgccagtgtttcgacaatctcctgaccatagccgcgatactgaataccgtcatacatgcgaccaagcacgcgggcagtgtctttaatgctctctttatgaccaatctggctgccgcttgggccgagataagtaacgcgagcaccctggtcatatgcggcaacttcgaaagagcatcgggtacgagtgctgtctttttcgaagatgagcgcgatgtttttaccagtgagtttggcttcttctttaccgcttttcttatcggctttcagcttcgcggctaactgcagcaggctgttgagttcagctggcgtgaaatcgagtaatttcaggaaatgcttatgataaaacccggacatagatccctcctgtggctaacgcctcaatgaattaaaattcaatttatatggatgattattcatttgcaagtctaaagcataaatctttgtcacaaaggtggaggcaatgtcagtggtgtgtgacaataagagtatcggcaggacattaagaggaatgagccatggcaaacccggaacaactggaagaacagcgtgaagaaacacgtttgattattgaagaattactggaagatggcagcgatccggacgcgctgtacaccatcgaacaccatctttccgcagacgatctggaaaccctggaaaaagcagcagttgaagcgtttaaactcggttacgaagtgaccgatccagaagagctggaagttgaagatggtgatatcgtgatttgctgcgacatcctcagcgagtgcgcgttgaatgccgatctgatcgatgcccaggttgaacaactgatgacgctggcagagaaatttgacgttgagtacgacggatggggcacttactttgaagatcctaacggcgaagatggcgacgatgaagattttgtcgatgaagacgatgacggagttcgccactaattaagcgtagcgcatcaggcccaggtagttcctgcaacctggtgaatttgtagcccggataaggcattcatgtcacatccggcataaacaaaacgtacgttgttaatgttcgaatgcccgcgagttgaacacgcgggcatttttttagagttcgcgcaacatccgcacttcacaatcgacatggcccgtgcagccaagcgcatagtcgatatgctcaaagcccaaatgctcataaagcgcaatggcttcctttaaaaaagcggtcgtttccagatagcagcgtttgaaacccatctctcgcgcctgctccatcgccattaaggccagtttttttgccagccctttgccgcggatagccggaagaaaatacatcttttgcagttcgcaaatatcgctctcactcccggttaatggcgctatcccaccgccgccgaccacttcaccctcgtactcaacgacccaatatgcatggccaggctgactatatacttgatacagctcgtcaagattcggatcggcgacggtgtagcctttatcagcggtaagaccgtattcggcggatacctgacgaatgacgcgggcgatagcaggattatcctgcagcgtcaggcgacgcattacaggactttgcggcgcaatgttattcatagtttaacccaataaaaataaagtaattatacatttgtttaataccactctcttcttacgtacgcaagcgacttataaagtaataaagtttttgccagcctattactgataagagtattgtaacgtggcagaacattttactgtctgtatatataagttatatcaatggattttttaattcagggaatttttatggctcaagttattaatgaaatggatgttccgtcccatagctttgtttttcatggtacaggtgagagatattttcttatttgtgtggtgaatgtgttgttaacgattataacgctaggtatctatttaccatgggcattaatgaaatgtaagcgttatctttatgctaatatggaagttaacggacaacgattttcttatggaattaccggtgggaatgtttttgttagttgtcttttttttgtttttttctatttcgcaatcttaatgacagtgagtgcagatatgccgcttgttggttgtgttttgactttgttactgttggttttgcttatatttatggcagcaaaaggactgcgtcatcaggccttaatgaccagtctcaacggcgtaagatttagttttaattgctctatgaaagggttctggtgggtgacctttttcttgccgattttaatggccattgggatggggactgttttctttatcagcacaaagatgctacctgccaatagtagtagtagtgttattatatccatggttctgatggcaatagttggtattgtttccattggtatttttaatggtactttatatagtctggtaatgagttttctctggagtaataccagtttcggtatacatcgtttcaaggtgaaattagatactacgtattgtataaaatatgccattctcgcatttttagctttattgccttttctcgctgttgctggttatattatcttcgatcaaatattaaatgcgtatgatagttctgtatatgcaaatgatgacattgagaatttacagcaatttatggaaatgcaacgtaaaatgataatcgcgcagttaatctattattttgggattgctgttagcacaagttatttaacggtgtctttgcgaaaccattttatgagcaacctgagtctgaatgatgggcgtattcgttttcgcttaactttaacgtaccacggtatgctttatcgcatgtgtgcgttggtggtgatatccgggattacgggcggtctggcttatccactgctgaaaatatggatgattgactggcaggcaaaaaatacgtatttgctgggcgatttggatgaccttcctttaatcaataaagaagaacaaccagataaaggcttcttagccagtattagtcggggagttatgccttctttaccatttctgtaagagataaaaaaggccggagcatgctccggccttcgttttcatcactgtgttttgattacagcgcggcgataacagcctgctgttcaatcagtttcgctttcgcttccgcatagccttccagcttctcacgctctttcgcgatgaccgcttccggtgcgcgggcgacaaagccttcgttcgccagtttgttctcgatacggctgatttcaccttcaatcttcgccacttctttcgccagacgcgccagctcatcttctttgttgatgaggccagccatcgggatcagcagctctgcaccgtcgatgatcttcgtaacggaaaccggacctttgtcatcggcaggcagcacggtgatactttccagacgcgccagggtttgcaggaagccacggttttcatttacgcgacgttctgcatccgcgctgcaaccacgcagcagcagctccagcggtttgcccggcgcgatgttcatttctgcacggatgttacgtaccgcaacgatcgcctgtttcagccattcggtgtcggccagtgcggcttcatcaacctgagatgcatcgtactgcgggaacggctgcagcatgatggtgtcggcagtgataccgcaaagtactttcacacgctgccagatggtttcggtgatgaacggaatgatcggatgcgcgaggcgcagcagaccttccagtacagtcaccagcgtatggcgagtaccgcgcagttctgcttcggtgccaccgttcattaccggcttggtcagctcgagataccagtcacagaactggttccaggtgaactcatacagaatgcctgcggcgatatcgaagcggaagctgtccagcgcttcgcggtacgctttgatggtctggttgaactccgccagaatccagcggtccgccaggctcagcgtcatttcgccgccgttgaagccgcaatcctgaccttctgtgttcatcagcacaaagcggctggcgttccacagcttgttacagaagttacggtaaccttccagacgcttcatatcccagttgatgtcacgaccggtagacgccagcgccgccagggtgaagcgcagcgcgtcagtaccgtgcggctcaataccgttcgggaactgcttctcggtgcgcttacggattttgtccgccagctgcggctgcatcatattgccggtacgtttttccagcagttctggcaggctaataccgtcaaccatatccagtgggtcgataacgttacccttggatttggacatcttctggccttcgtcatcacgaatcaggccggtcatgtaaacggtgtggaacggcacctgcggtttgccattttcatctttgatgaagtgcatggtcatcatgatcatgcgggcaatccagaagaaaatgatgtcgaaaccagataccatcacgctggttgggtggaactgacgcagggcgtcggtattttccggccagccaagggtagagaaggtccacagcgcagaagagaaccaggtatcgagaacgtcttcgtcctgacgcaggacaacatcagcaccgaggttattttctttacgcacttcgtcttcgttgcggccaacataaacgttacccgcttcgtcataccatgccgggatacggtgaccccaccacaactgacgagagatacaccagtcctgaatatcgcgcatccaggagaagtacatgttttcgtactgcttcggtacgaactgaatgtcgccgttctcaaccgcttcaaccgccggtttcgccaggacatcggcacgcacgtaccactggtcggtcagcattggttcgataactacgccgccacggtcgccgtaaggaacggtcaggtcgtgcggtttaatttcttccagcaggccaagcgcgtcaactgcggcaacgactgctttacgtgcagcaaaacgctccagtttctggaactctgcagggatttcgctggaataaacgtcagattcgttacctttggtatcgaacacctgggcgctttcacggatatcgccgtcaaaggtcaggatgttgatcatcggcagggcgtgacgtttacccacttcatagtcgttaaagtcgtgcgccggagtgattttcacgcagccggtgcctttttccatgtcggcgtgttcgtcgccaacgatcggaatacgacggttaaccagcggcagaatgacatatttgccaatcagatctttgtaacgcggatcttccgggttaacggctacgccagtatcgcccagcagggtttctggacgggtagtcgcgaccaccagataatctttaccgtctgcggttttcgcaccgtcagccagcggatagcggatgtgccacatgctacctttgctttcgcggttttcgacttccaggtcagagatagcggtgcgcagtttcggatcccagtttaccaggcgtttgccacggtaaatcaggtcttctttatacagacgaacgaaaacttctttcaccgcattggacaggccttcgtccatggtgaagcgttcacgctcccagtcgacggagttgccgagacggcgcatctgacgggtaatggtgccgccagattccgctttccattcccagattttgtcgatgaaagcttcgcggccgtagtcgtgacgggttttaccttcttctgcggcaatcttgcgctcaacgaccatctgggtagcgatcccggcgtggtcagtaccgacctgccacagggtgtttttgccctgcatgcgctgatagcggatcatggtatccatgatggtttgctggaaggcgtgacccatatgcaaactgccggtgacgttcggcggcgggatcatgatgcagaaactttcctggctttcatcgccattaggcttaaagtagccctgcttttcccagtgctcgtaaagcggctgttcgatatcttgtgggttatatgtcttttccattatttccaggttgccgtattcaggttgaaaccagccacgcggtaggctttatagcgttcgcgcgccagttgtttcagagaatcttcataaggaacgaagtctaccacttctgtgaaagcggtggcaaaatctgcaaagcttgttcgcagactaatcaatatatcgcgccggctgctgctacgcttttgcggccaggcgatctccaccggtgcaccgccgcgcggtccttctcccgctaaattatgcggaacaaagctttctgccggacgcgcccacagggcttcatccagccggtaagcctgcttttcatcttcacaggcgatgagcacgcgcttaccgctgcgccaacgttctgcggcaatttcacacaccagttgctcaacggcgcttaagccatcgacggtggtgtcattgtccagaaggtagaacgtcgcgtttttcataaatggggcttcttgtggtggatttaaatacgcatcaggtatacaccgcagcgcctgatgcgacgctgttgtgtcttatcaggcctacgagttcagtgctgtgtaggtcggataaggcgttcacgccgcatccggcaataacagccttgcctgacgcaattactcttcgccgttaaacccagcgcggtttaacaggaactgtgccagcaacgctaccggacgaccggtggcgccttttgctttaccagaacgccaggcggtaccggcgatatccaggtgcgcccagttgtacttacgggtaaagcgactcaggaagcaacctgcggtaatcgccccaccaggacgaccgccaatgttcgccatatcggcaaaattggactccagttgttcctgatactcgtcacccagcggtaagcgccatgcgcggtcaccggattgttcagacgcggcaatcagttcatgggccagcggattatggttcgccatcagaccagtaatatgatgacccagcgcgatcacgcaggcaccggtcagcgtcgccacgtcaatcaccgcttccggctcaaaacgctcaacgtaagttaacacgtcgcacagtaccaggcggccttcagcgtcggtgttcagcacttcaacggtttgaccggacatggtggttaacacatcgcccggacgataggctcgtccgccaggcatgttttcgcagcctgccaacacgccgataacgttaatcggcagttgtagctccgcgaccatccgcatcacgccgtaaaccgctgccgcaccgcacatatcgtacttcatctcatccatgccttcactaggcttgatgctgataccgccggagtcgaaggttaaacctttacccaccagcacgattgggcgtgcatcttcgctcgcgttgcctttgtactcaatcacgctcatcaggctttcgttttggctaccctgaccgaccgccagataggaatgcatccccagctctttcatctgctgttcgccgataacgcgggtgatgacattcttgctgtagctgtcagccagctggcgcgcttgactagcgaggtaagcggcgttacagatattcggcggcatattgccgagatcttttgctgctttaatcccggcggcaatcgccagaccgtgctggatcgcgcgctcaccgctggtcagttcacggcgggtcggcacgttgaacaccatcttacgcagcggacgacgcggttcgctcttgttcgttttcagctgatcgaaactgtagagcgtctcttttgccgtctcgacagcctgacgcactttccagtagttgttacggcctttaacgtgcagctcagtcagaaagcagaccgcttccatactgccagtatcattcagcgtattaatggttttctgaataacctgcttgtactgacgctcatccagctcacgttctttgccgcaaccaataaggagaattcgctcggaaagtacattcggaacatggtgcagcaacaatgtctgccccggttttccttccagttcgccccgacgtagcagggcgctgatgtacccatcgctgattttatcgagctgttctgcaatcggagaaaggcgacgtggttcgaagacgcccacgacgatgcaggaactccgctgtttctccgggctaccgctttttacactaaactccatgcactacgctcctgaatcttaaagacaacggcggtggctacagatagaattgcaagctttcgtaactcatgtccgctgttgcgatgacttcgtgttaatcttaacgttattacggcattggcacgtcagaacaaaatctgagaggtgaatccgttgagtataattatcttagcgacgatttcgacgactcaagagaataaatgacgtttaagccatgaaacaagctaaaatcctgcaaaagacgagtttttacgggcgtatttaaagtgataatcataagatatctggtgcgggagacgctcaaaagccagctggcgatactcttcatcttgcttttgatcttcttctgtcaaaagttagtgaggatcctcggcgcagcggttgacggcgatattccggcgaatctggtgctctcccttctcgggttgggcgtgccggaaatggcgcagcttatcctgccattaagcctgttcctcgggctgctgatgacgctgggcaaactgtataccgaaagtgaaattacggtaatgcatgcctgcggcctgagcaaagcggttctggtgaaagcggcaatgatccttgcggtattcacggcaatcgtagcggcggttaacgtgatgtgggcgggaccgtggagtagccgtcatcaggatgaagtgttagcagaagcgaaagcgaaccctggcatggcggcgctggcgcaagggcaattccagcaagcgactaatggcagcagcgtgctgttcatcgaaagcgttgacggcagcgatttcaaagatgtgttcctcgcgcaaattcgaccaaaaggtaatgcacgtccttctgtggtggtggccgattccggacatttaacccagctgcgcgacggctcccaggtcgtcactctcaaccagggaacgcgcttcgaaggcactgcattgttacgtgatttccgcattacggacttccaggattatcaggcgatcattggtcaccaggcggtggcgctcgacccgaacgataccgaccagatggacatgcgcacattgtggaacactgacaccgatcgtgctcgcgcagaactgaactggcgtatcacgttggtattcaccgtgtttatgatggcacttatggtcgtaccgctgagcgtggttaacccacgtcagggacgcgtactgagcatgctgccagccatgctgctgtatctacttttcttcctgatccagacctccctgaaaagcaacggcggtaaaggtaagctggacccgacgctgtggatgtggaccgttaacctgatttatctggctttagcgattgttctcaacctttgggacaccgtgccggtccgccgcctgcgcgccagttttagccgtaaaggagcggtgtgatgcaaccttttggcgtacttgaccgctatatcggtaaaactattttcaccaccatcatgatgacactgttcatgctggtgagcctgagcggcattatcaagtttgtcgatcagctgaaaaaagccgggcaggggagttacgacgcgttaggcgcaggaatgtataccttgctgagcgtgccgaaagatgtgcagatcttcttcccgatggcggctctgcttggggcgttgcttggtcttgggatgctggcgcagcgcagcgaactggtggtgatgcaggcttctggttttacccgtatgcaggtggcgctgagcgtgatgaaaaccgccattccgctggtcttgctgacgatggcgattggcgaatgggtcgcgccgcagggcgagcagatggcgcgtaactaccgtgcgcaggcgatgtacggcggcagcttgctctctacccagcaaggcttatgggcgaaagatggcaacaacttcgtctacattgagcgggttaaaggtgacgaagagttaggtggcatcagcatttatgcctttaacgagaatcgtcgtctgcaatccgtacgctatgccgctactgcgaagtttgacccggaacataaagtctggcgtctgagccaggttgatgaatctgatctgaccaatccgaaacagattaccggtagccagacggtgagcggcacctggaaaaccaacctcacgccggacaaactgggcgtggtggcgctggacccggatgcactctctatcagcggtttgcacaactatgtgaagtatctgaagagcagcggtcaggatgccggacgttatcagctcaacatgtggagcaaaatcttccagccgctatctgtggcggtgatgatgctgatggcgctgagcttcatctttggcccactgcgtagcgtaccgatgggcgtgcgtgtggtcaccggtatcagtttcggttttgtcttctacgtactggaccagatcttcggcccgctgacgttggtttatggcatcccgccgatcatcggcgcactgttgccaagcgccagcttcttcttaatcagcctgtggctgttaatgagaaaaagctaaccgaatgaacgaataaagggagcgaaagctccctttattattgttagcaaagtgtgcttcgttcattcctgaaaaataattaaaattcaatatattgcagtggggtgggcatgataagacgcgccagcgtcgcatcaggcaaagacaaatctcgcctgacttaccttcttctcccccccagcaaactccccaacatcccgcgtacaatctgattcgtcacttggcgagcggcgcttttggccattgtttgcaccacaccatctttcttcccgccgcgtggtccggtagtgccgaacaaaatatccttcaatccaccaagaatgccgtcatccaccgctacctctttccctttcgcgggaggattattttgctgctcggtactggcctgaaagcctttttgcaacatctcataggcggattcccggtccacctcatcctcatatttgccatacaccggagagtgattaatcaagccattacgctcatcttccgtcaccggccccatccggctacaaggcgcgatcaccatcgcacgctccaccacagaagggcttcctttcgcatccagaaaagagatcaacgcctcgccggtgcccagttcctgaatcgccttttcggtatcaaacgccggattggcccgcatggtttgcgccgctgccttcactgctttctgatcttttggcgtaaaagcccgcaaagcatgttgaacgcgattaccgagctgcccgagcacattatccggaatatcagacgggttttggctaacgaaccagacgcccacgcctttactgcgaataagccttatcacctgctcaatcttatccagcagtacctgcggggcatcgttaaacagcagatgtgcctcgtcgaagaaaaacaccagttttggtttctccagatcgcccgcttccggcaattgttcatacaactcactaagcatccacagcaggctggcggcgtacagtttcggcatctgataaagtttctcggcgctgaggatattgataacgcctttaccgttggcatcggtgcgcatccagtctttgatatccagcatcggctcaccaaagaagtgtgctgcgccttgctgttccaggctcaacagcccgcgctggatggcaccaacgcttgcgctactgatattaccgtactgattctggaaggatttggcgttatcgccgatgtactgggtaattgcccgcagatctttaaagtcgagcagtaacagcccctgatcgtcagcaatgcggaagatgatattcagcacgccagattgcacatcgttgagattcaacagtcgtgccagcaacagcggccccagatcgctaaccgtcgcccgcaccggatggcctttctcgccaaagatatcccacaccaccaccggattggcatgcggttgccagtcattgacgccgatatttttaagccttgcgagcagtttttcgctcaccgttcctgcctgcgcgacgccggtcagatcgcctttcacatcagccataaacaccggcacgccgatttcgctcaaactctccgccagtttttgcagcgtaacggttttacccgtccccgttgcgccggtaatcagcccatgacggttagccattcccggcagtaaaaacagttctgtgtccggcgtgcgggcaattaacaggggttcactcatgagatatcctccagtttcctgcctggagtataggcaacgtccggcaaagagaatacgtgtaatgaagagaaaataacttaaagcgtgttgccgtgataaatctgatacccgaggtcaacagtgttgtggttgtgatcgttatttttaattttgctcagcaacatttgggcggccatccgaccaatatcaaaacggggagtaattacgctggcgaggcttgggatcatttgcctgccaatctccagcccatgaaaacccgcaatggaaatttgttctggcacggcgaggtttcgctcgcggcacagcagaagcgcacccatcgcaatatcgtcattggtgcaaaatacaccgtctaaatccgggtttgcgctaagggcatcacgcattaactgcattcctaaatgaatggaactgatggcgcgtggattcatgcgtaatggggaaagattatgcagcatcatcgcatcgcaatacccctgataacgctgttcatcgcgggtgtcatctttggaaccgagatacagaattttgtgcctgactcgcttctccagcatggtacacaccatgtcaaaagcggcctgccgattatcaaaaccgacctccatatccagccgttctccctgtacatccatcaattccacgaccggaatggtggcactacgcagaaatttcaccgtcctgatggtgtgatatttttcgctaagtataatcccgtcaatgttataagagagcaggttaatcacgctctcttcttcggaatcgcgatcgtaattgtaattagcaataagggtctgataattatgctcagaggtgacggattctattcccgcgagaatgtcagcgaagagttgattttgaaaactcggaatcaagataccgagggtataactttgtgcattcaacaacatgccgggagcgcgattagggatataattgatctcttccataattttggcgatgcgctcgcctgtttcctttgccacctttttcgggctgcggatataacgactcacggtcatttttgttacgccagccagcgtagcgatatcctgtaaagaaattctgtgattgcgcataacttctcccaacgtcgggggaatcttcaatcttcccccgaaactacatcacaatattttattctttcagtgcaatacggcgttaatggctaacacgcccagcaaacccataatagaaataagggtttccatcaccgtccaggtacgcaacgtttcaccaaccgtcagattaaaataccctttaaatagccagaagccagggtcgtttacgtgactcgcgatcacgctgcccgcaccggttgccagtaccattaaagcgggatcggcatgggtaacgttgataatcggcaacaccacacccgcggtggtaatggccgcgacggtggcagagcccagagcgatacgcaacagcgccgcaacagtccagcacatcaataacgggctaagtgtagttccggtcattaagtgactaatatagtgcccgacaccgctatctactaatacctgcttaaacgcgccgccgccagcgataataaacacaatcatcgcgatagcgcctatagaatccccaatgatatccatgatttgctcgatggtgcgtccattacgtcggcccagtgtgaaaatcgcaataacaatggcaataaacagcgcaacggcagggttaccgacaaattcaaagaagaggcgcacggtgttagttttcggtaacgtaatttcacaaacggcggcgatagccatcaggatgaccgggatcacggcagcgaaaatactgttccagaaggagggcatctcctcttcgctaaacagatgaggattaaataagccttccggtggtgctttctcaaagcgagttagcagtttagaaaacagcggtcctgcgacaataactgtcggaatggtaatgataaatccatacagtaaagtcgttccgagattagcctcaaagatagtcgcgatggcagtaggccctggatgtggcggcagaaaacagtgggttacagagagcgctgctaccattggtacgccaacatacaacaggggtaatccactacttgctacgatggtaaataccaacggcaacagcaggacaaaacccacttcaaaaaacatggcgaggcccacaaccagaccggtgatcactagcgcccattgcacgcgttttttaccaaaagtagcaatcagcgtagtggcgatacgttgtgccgcacccgtatcagaaatcagcttgcctaacatggccccgaaaccgaggatcattgccagcccgccgagcgtgctgccgataccattttgtatagagtgcaggacggcctgtgcatccatcccttcggcaaatccgacgacggcagctaccagaacgagggcaataaagccgttaactttaaagccgatcatcaggataagaagcagcgcgacgcctgccgcaataatgattaatggcatagtctttatctcttattagtgccagaaaagcagcgctttcgcgctgcacgtaggggggctgttaaacagccactaacatgccgccatcaacaaacaacaggtggccgtttacgaaatcagaggctttactagaaaggaacaccgcagcaccaatcagttcctgcggatctccccagcgtgcggcgggggtccgtttgcacaaccaggcggtgaaggcttcgtcctcaaccagtgctttagtcatttctgttttgaaatagcccggcgcaataccgttgacctgaatattgtggcgcgccagctcgacgcacatgccgcgggtgagcatttttaccgcccctttgcttgcggcataaggggtgatggtgtcacgtcccagttcgctttgcatgctgcaaatattaataactttacctgccttgcgttcaaccatgtgacgagttaccgcttggcttaccaggaacacggcggtctggtttactgcgatcacatcattccactcttgttcagggaactcagtaaaaggatgacggcgctggataccggcgttattcaccagcacatcaatggggccgatgtccttttcgatatgttcaacggcggcatcaatttcatgtttatgagtaacattaaaaggtgcggcaacggcctgaataccctcctggtggagtttttctacagcaagttctgcgcgttcggcagtaatatcattaataattatttgtgcgccatatttacccaggccggttgccagtaaaaagccaatgccctgtgcactaccggtaatcaagatattttttcctgccagactaaatagatcgttcattgtattattcctttatttatctcttagaaaacaagctggacttttgctgcctgggttttatcaccggcgaaacgtagcgcctcttccaggtcagtgaagggatattcagcactcagtaaaggcagtggattgataacgccattcgccagccaactcactgcggtattaaattcgctggtaaaacggaaagagcctctgagactaatctccttaccaatcaacgtcatcattgggaattctgccatcgcgcctcccatacctacctgcaccattacgccgcgtgcacgagtgacctccagacaggtattcacactactaggatgaccggacacttcaaagctgacatcgaaatagcctttttccgctttccagtgatccatgtcgtcgttttgtgggtttacgagcacatccgcccccatctctttgcccaggctaagggaacggggactcacatcagcacagacaatttccgcggcccccagtgttttcactgcactgacaatcaggcagccaatgggtccaacaccggaaataaatactcgcttgccctgtaactcgccggcctgatgtgcggcatgaatcgcgacggctaaaggttcggcaaaagccataaccttttcgtcagctttggccggataagggacacattggctcgtttcgaccattttataacgggtaaaaccaccatcaacatgagggaaatacatggcactgccaaaaaaacgcatatctgtacactgattctcgttatgttcaatgcagtatttgcagtgaccgcacggtttagacggattaatggctaccgtttgcccttcatgtaattcactactgtcgctatgaataactttaccgataacttcatgacctaacaccatcggtgcctttatcatgaaattacctacttttccttcctgataataatgtaaatcggaaccgcaaattccacctcgggttatttgtactaatgttccattattattccaatctatcgtctgctcggtaacggcaacagttttcttgcccgcaacaacgcaggactgtgttttcacttgcataaattcctcactggtcaggtagacacctcggaagcatttaagcggttttaactgtcattatttgtgatgaagatcacgtcagaaaattgttacattactatgttacgcataacgtgatgtgccttgtaattcttatcagtagaaataaaaaaacgtgaaattattatgccgccaggcgtagtatcgcagcaggtaagatgattcaggagattttaaatggcgggtgaaagctttattttgatgggcgttagtgggagtggtaaaacattaattggtagcaaggttgccgcgttattatctgctaaatttattgatggtgacgatcttcatccagccaaaaatatagataaaatgagccagggtattccattatctgatgaagatcgacttccctggctggaacgcttaaatgatgctagttacagtctttataaaaagaatgaaacaggatttattgtctgtagtagtttaaaaaaacagtatcgtgatattttacgcaagggtagcccccatgttcatttcctctggttagatggcgactatgaaactattctcgcgcgaatgcagcgtcgggctgggcattttatgccggtagcgttactaaaaagtcagtttgaggcactggagcgtccacaagcagatgaacaggatattgtgcgcattgatatcaaccatgatattgccaatgtcaccgaacaatgtcggcaggctgtgctggcgatacgacaaaacagaatatgtgcgaaagagggcagcgccagtgatcagcgctgcgaatgattttcaaaaatcggctttcaacaccacgcggtaacgcgccttaccgtcgcgcacatgctggatggcgtcgttaattttgctcatcgggaacagttcggtggtcggcgcaaccttgctgcgggcggcaaaacgcatcagcttacgcagctcataaggcgtgccggtagcagaaccagagacgctgcgatcgcccgcaattaacgtaaaggccggaacagacagcggcgtgagaaccgcaccgaccgtatggaaattaccgccataggtcagcgcctcaaaatagggctgccagtcgaggctgacgttgacggtgttgataatgagatcaaactgccccgccagtgctttcagtgcctgcggatcgcggctattcaccactttatcggcacccatcgccagcacttcctgctctttcgccggattagaactaaaggctgtcacctcgcatcccattgcgtgcagaagttttatagcgatatgccccagcccgccaataccaattaccccaacgcggctggtagcagtgatatggtgcatcaacagtggtttaaagaccgtgataccgccgcacaacagcggcccggcggactcgatatcaatattttctggcagtggaatcacccattgccagtccgcacgcaacttctcggcaaagccaccgcgattcataatcgtcggcaccgcaccttgctcgcagttgatctgattaccgctaatacaggcgtcgcagtgaccacagctacgcgccgtccagccaatcccgacacgctgaccgacctgcaaacctttatcctgcgcggcgctcccgagtgccaccacgcgcccaatcacctcatgcccggcaaccagcggatattgactaaatccccattcgttatcgatcatgctcagatcggaatggcagatcccgcagtaatccacctgcacttcaacatcttgtggcctcagctcaccgggatcgtactcataaacttccagttcgccgcccgcttcttttgcggcatagctttttatcatgctcattttttggtccttctctggtgttgtttgggaagtgtagagcatggcagggcggggtgcctggagtgtgacaaaggttacacatcgctgtatgcaatgctgaaaatttcagcacttagcgaggtgcgagcaagctggcgcttgcatggtggcgtgcgacaggtataatccacaacgttttccgcatacctcttcagtgccgaagtggcgaaatcggtagacgcagttgattcaaaatcaaccgtagaaatacgtgccggttcgagtccggccttcggcaccaaaagtatgtaaatagacctcaactgaggtctttttttatgcctgaaatccagtgtttatctatctttcccgctatattaactctctcaaggtcaaccgatatcaacgtacatctaccaacatatgttggtacagatgatggtatttccggttcgataatgcttgtaccaacagggagggaatacgagaaatcacaggacattgctaatgctggtacgcaatattacctgaagctaaaaacctgcacgttagccctttgtaggccagataagacgcgtcagcgtcgcatctggcataaacaaagcgcactttgctggtctgttcccctcaccctaaccctctccccggaggggcgaggggactgtccgggcacatttttagactttgtcatcagtctgagcctgccattggcaggctctggtgtccttttacgctaccatgctaataatcagcacaataatcagcccaaccacggagttgaccagctccagcagaccccaggttttcaacgtgtcttttacactcaggtcaaagtaacctttgaacaaccagaaagatgcatcgttaatgtgggtgagggtgttggaacccgcagccgtcgccagtaccagcagcgccggattcacgccaaccagctgaccagttgctggatctaggattgcagcactgataatcccggcggcggtcatcgcgctaacgacaccctgacccgtcgccagacgaattagcacagtgatcagccatgccatgatgtaggggctgatattgccgtgggacatcaacatgccgatggtgtcgccaatgccggtgtcgatgatggtctgcttcagcacgccacccgcaccgatgatcagaatcaccattgcaatactcttcaccgcgctttcaaaagcgttcatcacccactgcatgtcatgaccacgtgcggtgccaaagagtacgaatgcaaccaccatcgcaataaacattgcaatcgggctggaaccgataaagttaaccacttcccaggcaggggtatcttttaccagccagatattggcgatggtggtagagatcataatgatcgccgggatcagcggcaccagaatgctaacgccgaaagagggcagattattcatatctaccggttgatctgctttcaggaaacttggcgttgggcgctcaagattgccgaggaacttcggcaggatcagacctgcgcagattacacttgggatcgtcaccagtacgccatagatataaaccatccccatatccgcgccataagcattcaccagcgccaccggacccggctgcggtgggaacagactatgtgcggtagtggcagctgctactgccgggatcgccagtttcaggaacggaattttagcttcggcggcaataacaataaccagcggcgctaacatgataaaggccacttcatagaacatcgccagaccaaaaatcaggccgatgataatcacgctcagctgtacatagcgcagaccgagacgcgccagcagcgtatgcgctatctggtgagccgcgccggagtcgaccatcaatttaccgatgaccgcaccgaacaccacgatgatagccagttcccccagcgtgttgccgaagcccgctttcatagtgtgcagcaggctcatcaaatccatgcccgccagcatcccgacggacagcgccgccaccaacaaagccaccatactattgattttgaacttcaaattcagtaccagcatcagaccaatgccgaataccacccagagaatgttaagcacatgcataacgttttaccttacctggttgaaccgttgttattttgggcgatatgttatgtaaattggtcaaccattgttgcgatgaatgtcacatcctctgatcaataaccatcgattaccctttgctgcaatttgcagcaacaaccatgagagtgaaattcttgtgatgtggttaaccaatttcagaattcgggttgacatgtcttaccaaaaggtagaacttatacgccatctcatccgatgcaacgccacggctgcggtctggttgttcatccggatacctaaacaactccagggttccgcgtctctttgctgtggaacccactatgtgaaagaggaaaaatcatggaacagacctggcgctggtacggcccaaacgatccggtttctttagctgatgtccgtcaggcgggcgcaactggcgtggttaccgcgctgcaccatatcccgaacggcgaagtatggtccgttgaagagatcctcaaacgcaaggcgatcattgaagacgcaggcctggtgtggtctgtcgtagaaagcgtgccaattcacgaagatatcaaaacccacactggcaactatgagcagtggatcgctaactatcagcagactctgcgcaacctggcgcagtgtggcattcgcaccgtgtgctacaacttcatgccggtgctcgactggacccgtactgacctcgaatacgtgctgccagacggctccaaagctctgcgcttcgaccagatcgaattcgctgcattcgaaatgcatatcctgaaacgcccaggcgcggaagcggattacaccgaagaagaaattgctcaggcagctgaacgcttcgccactatgagcgatgaagacaaagcgcgtctgacccgtaacatcattgctggtcttccgggcgcggaagaaggctacaccctcgaccagttccgtaaacacctggagctgtacaaagatatcgacaaagcgaagctgcgcgaaaactttgccgtcttcctgaaagcgattattccagttgctgaagaagtcggcgtgcgtatggctgttcacccggacgatccgccgcgcccgatcctcggcctgccgcgcattgtttccaccattgaagatatgcagtggatggttgataccgtaaacagcatggcaaacggttttaccatgtgcaccggttcctacggcgtgcgtgctgacaacgatctggttgatatgatcaagcagttcggtccgcgtatttacttcacccatctgcgctccaccatgcgtgaagataacccgaaaaccttccacgaagcggcgcacctgaacggtgacgttgatatgtacgaagtggtgaaagcgattgttgaagaagaacaccgtcgtaaagcggaaggcaaagaagacctgatcccgatgcgtccggaccacggtcatcagatgctggacgacctgaagaagaaaaccaacccaggttactccgcaattggtcgtctgaaaggcctggccgaagttcgcggtgtcgaactggcgatccagcgcgctttctttagccgttaatatccaccggcatggctgcgcgccgtgccggttccttcttccttgccgtcactctttgaagacggattctggagtttacgatgactactattgttgacagcaatctgccggttgcccgcccgagttgggatcattctcgtctggaaagtcgcattgtgcatctcggttgcggggcgtttcaccgcgcgcaccaggcgctgtatacccatcatctgctggaaagcaccgacagcgactggggcatctgcgaagttaacctgatgccaggcaacgaccgcgtgctgatcgaaaacctgaaaaaacagcaactgctgtacaccgtagcggaaaaaggcgcagagagcaccgagctgaaaattatcggtagcatgaaagaagcgctgcatccggaaatcgatggctgcgaaggtattctcaacgcgatggcgcgtccgcaaacggcgattgtctctctaacggtcacggaaaaaggctactgcgctgatgcggcaagcggtcaactggatctcaataacccgctgatcaagcacgatctggaaaacccgactgcgccgaagtccgcgattggttacatcgtcgaagcgttgcgtctgcgtcgtgaaaaagggttgaaagcgtttacggtgatgtcctgcgataacgtgcgtgaaaacggtcatgtggcgaaggtcgcggtactggggctggctcaggcgcgtgacccgcagctggcggcatggattgaagaaaatgtcaccttcccgtgcaccatggttgaccgcatcgttccggcggcgacgccagaaaccttacaggaaattgctgaccagctgggtgtttacgacccgtgcgccattgcctgcgaaccgttccgtcagtgggtgattgaagataacttcgttaatggtcgcccggattgggataaagtgggcgcacagttcgttgcagacgttgtgccgttcgaaatgatgaagctgcgtatgctgaacggcagccactcttttctggcgtacctcggttacctcggcggctatgaaaccattgccgacaccgtgactaacccggcttatcgcaaagcggcctttgccctgatgatgcaggaacaagcgccaacgctgagcatgccggaaggtacagacctgaacgcctatgcgacgctgctgatcgagcgtttcagcaacccgtctctgcgtcaccgtacctggcagattgcgatggacggcagccagaagttaccgcagcgtctgctggacccggtgcgtctgcacctgcaaaacggcggcagctggcgtcacctggcgctgggcgtggctggctggatgcgttacacccagggcgtggatgagcagggtaatgccattgacgtggtcgacccgatgctggcggagttccagaagatcaacgcgcagtatcagggcgcagaccgcgtgaaagcgctgctgggcctgagcggtatttttgccgatgatctgccgcagaatgccgactttgttggcgcagtgacggcggcatatcagcagctgtgcgaacgcggtgcgcgcgagtgtgtggctgcgctgtaactaactgattaccctacagacttactggtcaatcaaactgatatttggttgaccagttttcgtttttttgcccacctgtacgtgccaacttccagtgctaatggtatagtttgagattaacgggggccgtaaaattgcccgttgtaggccggataaggcgttcacgccgcatccggcaaaaatttgattaaccgcacctaacggacacaacaccatgaaatctgccacctctgcgcaaagaccttaccaggaagtcggggcgatgatccgcgatctgatcataaagacgccgtacaatcctggcgaacggctgccgccggagcgtgaaattgcagaaatgcttgatgtcacgcggacggtggtacgtgaagcgctgatcatgctggagatcaaagggctggtggaagtacgccggggtgccggtatctatgttcttgataacagtggcagccagaacacagacagtccggatgccaacgtctgcaacgatgccggtccttttgagctgttacaggcgcggcagttattggagagcaacatcgccgagtttgccgctttgcaggctacccgcgaagatatcgtcaaaatgcgtcaggcattgcaactggaagagcgtgaactggcttccagtgcgccgggcagcagcgaaagcggtgacatgcagttccatctcgctattgccgaagcaacgcataacagcatgctggtggagctgttccgtcagtcctggcagtggcgggaaaacaatccaatgtggatccagttgcacagccatctggatgacagcctgtatcgcaaagagtggttgggcgatcacaaacagatcctcgccgcgttaatcaaaaaagatgcccgagcggcgaagctggcaatgtggcagcatctggaaaacgttaagcaacgtctgctggaattcagcaacgttgacgatatttattttgatggctatctgtttgatagttggccgctggataaagtcgacgcctgacttattataataagcgcaagggtaaacgttccttgcgctttcttaaattaagaagtcgcaatgagtattactttgtaaattgcagggtattgtttagctatctgtataacctgaatgttagtactcattcttcctggtagtaaggcgagattattaaagttgccatgcagcgtccggggaagtgttgggcgctgttttttttgtttcttaataatgtgttgtaagccgtagaaggcgtgtaggtcgcaccctatgcgacctacacatcagtcaggaattacccttcacgttctaccactttaatttccaccatgccgatcccgagcttacgcgggctgtgtccgaggatattcccttcgttggtactgacaggttccggcggcacaattaccagtgtgtcggcatcggttgggttatcgaaatgcagtgtggtggtggtcacttcattgcccagcacaagagtttgttcttcattgcctacgcgtaccggaataggacggctggcgttattgccgtatgctttggcggtaatcaccaggtcaaatttcttcggcagcggatgcttgtactcgatttttacttcatcgcccagctgcgcgttggaccagcggccccagctctccggacgggaaatcccgctaaactgtttcacctcttctggcgcaccggcgacgttaaagatgaaactgtcggctttgtagcgaatatcgttatcaacaatcttcagcgtatcgacattgcctttgtaacgcgccatgtcgatgaccgtatctttaaatgccgttttgccctgccatgttgttttgtcaacatgctgaacaatttgctgaccgccaagctgcccttggctgacacaccagtcggtggaaagtgccagttccggagcccagagttgtgccatcttgtagcaacggtcaacccagacgaaattgtcgcgtggagcgaaatcggccagctggaaacgcagcggtgcactgtattcgctttccggcagcggttccacgcgtttgtcactaacccgcaacagcagcggcaaacggaaatggctaccgctgaaggcaatcatgtttttctgctggtcgatggtgaactctttcatctctttagggaatttccacaggcggatgatatctggcttccacgccaatgttttctctttgatattgaggaagatttcgctcatgctctgcccggataaactgctacgaccaagtccgagatagttatcgccaccgagaatgtccagcaccgtcgcgccgttatccatcgtgttacgcttcactgccagcgtctcttgctgcggcttgtcgccacgaatgacaaaaaacaggttattgcgatcctgcttattgaggtatttccacgccgtgttgttcatcgctaaatggtcagaagagacgacgatgacggtatctttaaaccacggactcgctttgattttgttgataaacgtcgcgatgttctcctggctgcaacttaccgcgctgaaactctgattcggtttaccgtcaaaatcatattttttgcggttacaggtacgagagataaaaccatccgggtgatgggtatcgactgtcagggtaaacagactgaatcgctgaccactgcgggaaagctcttcaaactttttccacgcttcatcgagaacggtatcgtcgtagaatccccagtcgttgcgatagtgcgggtcggctaccacgcttttcagctcttcactgccgtataagtggtcgaagccatggctcttcaggaacacatctttaccggcaaaacgcagattcgcgccctgcacgaaatagttctgataaccgctgtttttcaggatatctcccagacagatgttctgcgggaagaagctggagacagaggcggaggcgttgccttcaaagggggcaaacagcggtatgccgcactgagaagccaccatgcccgcaatcgtgtaatctgttcccggcagctgctgcgtgtggctgaaatccaggccttcatttttcaacgcgcccagttcaggcgtgagatccgggaaagcctcgttatcaaaataggtccgctcgagactttcgccgtagatataaaccaggttgagtttcgggtcagggatagttttgctcggctctttataataagccgcaaagtccgggtcgccgtcgcgactctgggatttcaccagttccgttatctgacgaaatgccgggctggcgtccacgctacccagcgccagtaagagcgccagcaggctgtaaccaaaatggtgcggatgatggcgacgacggcgcaggatccagcccagcgcaccgaacaccgctgtcagccccagcacaatgccgatacccggcaaaatgtatttgctgacgccagcaccggtcaggctgttggttaaggtatagagaaccgcgtcgttaataccatcgccagtaaaatagtcgctggcaaacagggtgatatttaaaacgacaaatagccccagcaccgttaacgtggctgcaaaccaccaggtgttacgtcccgctttccatgcgtaaatcagcacagaggcgagaaaaagggcgaaagagagtagttcactcaacgggcgatcctcactaaaccgggccgtttagccaacgtttaagctttttgagaagcacaatgtaatggcgtcgccatattgctgcaattctagtgtcaaaaaaatgcgatgttgttaggaattagtttataaacagacttttttgattacggtcacttcccgtgtaacaggggtaaaaccgtccaggagcagggaaaagggcaggagagagccgcgtcagccgggtaacagctaaaacgcggcgtttcgcggttcaggaaatgaagttcagcccctgttttaacaccagatcgcaggctttggttttcaccttttctgccagcggagttgttccgatgttatccagattgagttgctgaccatctttggttttcagcaaaccctgaatgccgtccagatagttggtgtcttctttttgctcttcactgttcaggcccagcttttccagcacctggttcttgatgttttcggcatcggttacgctcgccagcttttgcttcgcgcagtattgcagaatgcctgcggcattgttcatgttatctgcgcttaaggcctggtttccgctgctaagcaagttagttaaactcgcgaggctccaaccgccttcctgtgtcgtgctgttttggttgccaagttcgctggcggcgctggagagcgcatctttccaggacgcagcatgcaccccggtggaaattaatgcgctggcggcaatggcacagcacagaagatgtttaacagttttcatcatcattactcaaggtggaattgtgtcgcagtataccgccagaaacggggattaatactctttacctgttacccggctacggtagctatcccagttgaagatcacccacaaactgttacccaggcgcatacggtccatcacgcgttcgcccagcaacttggtcatctcttccatattactgttggtcagcatcccggttgggcgtttggaagaagagcggcgatcgacgatctggttgatgatcactttttcgtatttgctttcggtctgcacgccgatctcatcgatcaccagcagatcaacgttgctcagatcgttaagcagttgttcttcgctggtaccgctattcctgaaggtatctttcatcgcgctcataatatcggccacggtgatgatcaatacggatttaccgcgtagcagcagctcgttgcagattgccgccgccagatggtttttgccggttcctggcttaccagaaaagatgaagctggcgatgttgccgtcaaactcttcgacatactggcgcgctttgcttaacgcattcatctgcccttcacactcaacgcgatagttctcaaaggaacagttctgatgcagtggacgaataccggagcggttaaaggtgcgctgcattttcatcgcccgattttcacgttcgagagcggcggagcggatcgctccttgttctttttgccaggccagtagttcttcacccgttttgaatgcgggtttgatatgggcaggcatcattttttgcaggcgttgcatcaggtcgccaacgtttttcatcgttaccctctgaatcctggtggaatttggctgtcaggttcgctgaccgtattcacatctcgtttcggcagtccgccgttgctggcacgaccgatttgcaggctgcgcgccagtttttgttgccactgcacatggtgaaagactttaccttccgcctgccagtaggcaatgaaactggccagttcttcggtggtcaccggctctcttagcgccacgccccatagcgccgccaggcggataaaatcggcatcgggttgccagtccggatacatggcgaatttccccatgggtacagcaacgggagcggcttgcggttcctgatagagttgatcgtccagagcgacatcgcttcccggacgcgccagcttttcttccagcgccagcagttcagccaggcgtgcaggcgtgacggcataaaacgccggggcattgttagcaaatacggcaaccacaccgccttcagcttttgccagaacggtttggtgatcgtgtaccagggcgtcaataccaacgacgtccggggtcaaaactctggaagacatactgtttctcaaatatggaacgatgaacgagaagggagataacttttatagtaacacacggaggagaggaggctgtctctcatccgtgtgcttaagcgaggcaattttatacgcgagggcgcttgcggtacaaccataatccaggaatggaaagaccgatggataacgcaccaacaatgctactagctgtaagaaagttggttaacagggtaatcatcaacggttcgctgtaacctaactggctgatttttaccgcgctaatcattgcggtataagcgcttatgcccgggaacatagggataacggccgccacggtaaacactttcggatgcgccagataccagcggctccattgaataccaatggtaccgaccagcatagaagccataaaggtactccactcaatattcaacccgctggtcatcaagatcattcgggaaccatgacctatcgagccaagcagcgcacaccagcgtaacgcccgcacgggaacgttgaacaccatcgcaaagccgaccgcaggaatggcggcgaggatcatatcctgcgccaacgctaacagaaattcgatcacacccatccgcgtagcccccaaatcgtcagtgccatcactacgccgacgcaggtagccagtgtcagcagactggcgatcgcccagcgtgccagtccggtattgatgtggcctttaaacatatcggcgacggcattaatcaacggaaagcccggcactagcagcagaacgctggcggccatcgcaatggtgggggtattgctgaaagtggggagttgcaaaagcaatccggaaatggtggtggcggcgaaagcggtaaggcaaaagttgatctgtggatgaagatgacgttgtgccagcagctggcggatatacatcgcggtcgtactggcaaagaaggtgatgacggcaccatcccagccaccgttattgagtttacagaaacaggcgcaagaaaggccaaccattaaggctaccagccatcttgggtaacgtaatggctgaatttggctaaatcgtttctctacgcctttgtaatccagcagatgatgctccgcaagaatcacaatgtgctggacttcagtcaccacatgcatattaatgccgcgatcgtgatttttacgtgtgcttgtcaggcattgcccatctttaatagttgtcagcactatggcgttgctagagatagaactttcgacgctgtccattcccagtgcccgacccagtcgactggaaagctcatcaaccaacgcgctttccgcaccatgttgcaaaagaaataatccacactggatacaaagccgtgttacggctcgctgttgctcagtttgcataactcgccctttgtcatagacgtgctgcgtattgttcagataatgagaatccatttgtatcatgaagcacggttgttttgcggtaggttaagatcaaaattgcgctgattaatcctggttatcgggagaagctcggtgataaaaagcgaattatctctcgccgcaaacaaactatcacatgaatattatcatcataatgaatttattgtttggcctttacgaatcaggataatagataaccgggcacgttttttaatgttaacaagctaaaaccatcagatttcattgaataaatattggttgtgtgattttgcattctgcgggaagggatatcatttaattataaattaaatgaatgtgatttctgtttttcattaagtattcctaacaacttaatgtagatattttaaatgtctccaggctatttcaccaggttatcatttgatgctaaccttctgacacatgcagtggagttgttgtgcagcaggagtatgctgatatgaaagtgaatgctaaggataatttattcgcttaatctattaatttgctggaaacatttaaggaatgaatatcctgaataaaccatcataatttttagacagtggatgtggaggaaatatgttgccaggatgctgcaaaaatggaattgttatcagtaaaatacctgttatgcaagcagggttaaaagaggtcatgaggactcacttccctgaatatgaaataatatccagcgcctctgcggaggaccttaccttattacaattacgtcgttccggattagtcattgctgatttagccggtgaaagtgaagatccacgttctgtttgtgaacattattattctttaatcagtcaatatcgggaaattcactgggttttcatggtgagtcgctcctggtattcccaggcagtagaactgctcatgtgccctacggcgacgttattgtctgatgttgaacccattgagaatctggtcaagaccgtacgttccggcaatacgcacgcagagcgtatcagcgccatgctgacctccccggcaatgactgaaactcatgattttagctatcgctccgtcattctcactcttagtgagcgcaaggtactgcggctattaggtaaaggatggggcatcaaccagatagctagtttgcttaagaaaagtaataaaactatcagcgcccaaaaaaacagtgcgatgcgtcgactggcaattcacagcaacgctgaaatgtatgcatggataaatagcgcgcagggtgcaagagaacttaacttgccttctgtttatggagatgccgcagaatggaacacagccgaattaagaagagaaatgagccacagttaaaaaaatgcgtcatgagtagtatcggtattgagagtttattcagaaagtttgcgggtaacccttataagctccatacctataccagtcaggagagttttcaggatgccatgagccggatcagctttgcggcggtcattttttctttttctgccatgagaagtgagcgcagagagggattatcttgcctgactgaactggcgattaagtttccgcgtacccggcgtttagttattgcggatgatgatattgaagctcggctgattggtagtttgagcccaagtccgctggacggtgtattaagtaaagcgagtacgctggagatttttcatcaggaactctttttgagtttaaatggtgtacgtcaggcgaccgaccgactgaacaatcagtggtacattaaccaaagccggacgttaagcccgacggagagagaaatattgcgctttatgagccgtggctacagtatgacacaaattgccgagcagcttaaacgcaatatcaaaacgatccgtgcacataaatttaatgtgatgagcaaactgggcgtcagttctgacgcagggttgttggaggccgcagatattctgttatgtatgcggcattgcgaaacaagtaatgtgttgcatccctattaatccgcatgatgccgggtttacttccccggcagtgctttcatttcagcgtacaatcgccacattgctgcacatccggtaagcgataacgctggcagcaagtgcggcgcaccagcaggccgtcgcgcagtaccacggtacgccagagtggattatcttcaccgttcgtgagcgttttctcaaaaaagagggcatggcgcaggctttcaacagtagcctcgccgagcagttgcttcatctcagtgagataccagttgatcaaataaccggtattactccagataagtttgccgttgatctctccggtcgcttctagtgcttgcacaaccggaaccagcgcctggctgattaacgtttccattcgatgctgcgggctatgtggtgttgcgtttttatcttcacacacatcgacccagaaacaggcgacgcgtccggtttcgtgaaactcagcatggaaatgttccgggctcacatctaatgccttttcctgcgtcagtagcgccagcattaatggtggcaccatcaggccgatataccattgtgcccatagactgatcagcggtttgttctcgcggatcatcatcggttggttgcgatagatatgatcggaatagaccgccagcagagaacttagcacattcggactactccattgcgccagcgtcatggcgttaagtggggcaggttcatccaggcggataaactccagcaaatgttcacgatgttttgcgatcgtcgcccgcacggcttgcgcaagcgtgggatcctgcggctggagatgcgttcgccagatgacatcttcatagagcggtgcggaacgataggccataatcgggatagtaatctaaatgataatgattgctaatcatagcgataggtttacccgatagcaagggatttatctggcttgcaaatgataaaaattatcatatgatattggttatcattatcaatgaaagagatgaaatcatgttgcaacgtacgctgggcagtggctggggagtgttgctgccgggattgctgattgcagggctgatgtatgcggatttaagcagtgatcagtggcggattgtcattctgatgggattagtattgacgccgatgatgctgtatcacaaacagttgcggcattacattttgctaccaagctgcctggcacttattgctggcatcatgctgatgataatgaatttgaatcagggatgaaaaatcaaggaagaaacaagaaaggaagtaaagataattggtgcgaggggggggacttgaacccccacgtccgtaaggacactaacacctgaagctagcgcgtctaccaattccgccaccttcgcacagtcatcttactttttttgatatcgcctcgtttggtgcgaggggggggacttgaacccccacgtccgtaagaacactaacacctgaagctagcgcgtctaccaattccgccaccttcgcccagtgcgagcaatatcaacgtggtttttggtgcgaggggggggacttgaacccccacgtccgtaaggacactaacacctgaagctagcgcgtctaccaattccgccaccttcgcataccatcaattcttaaaaagaattgctaccacggaggcgcattctagtggttttcagcttttcgtcaatagttaattatcgacagaggtgtaattgctggaaaaatgtccatcaggaaactagcgtgcaggtttggtatgcatgcgggggcagatgccagatgcgacgctggcgcgtcttatctggcctacgaagggctaacgtgcaggttttgtaggtcggataaggcgttcacgccgcatccgacacggtattcggcgagataattaacctttcttcgcctggcgggtcataatggcgcgatacaccttgaagcgccctgtttgcgcgatcacttcgtggaagccaaatgtctcatccagcacgtccggataaggcaggaaggcgttcgctacaattcgcagctcgccgccgctattaagatgacgcaccgcaccgcgaatcagcgtttgcgccgcatccaggctggtttgcatcccatcgtggaacggcgggttggagatgatcatatcaaaacgacctttcacctcggaaaagacgttgctggcaaagacttcaccttcaacaccgttggccgcaagtgttgcgcggctggcttctaccgccggggcagagacatcgcacaaggtgagacgaattttcgggctatggcgcgcaaaggcaacactaagcacgcccgcgccacagccgacatccagcactttacctttcgtgtgcggagttaacgtgctgagcagcaactggctaccgacatccagaccgtcgcggctaaacacgccaggcagcgttttgaccgtcaggccatcgacgctgtattcgccccagaatttctccgcatcaaataccggctgtttttccagacgaccaaaatagaggccacagcgacgagcgctgtcgactttattcaacggcgcataatctgccagcatctgctcggcgctgcgcacgccgctgcggttctcgccaacgacaaaaatatctgtccccactggcagcagagaaagtaaattcatcaactggaactgggcttccggtttgttcttcggccagtagtaaatcagcgtatcgcaatctgcgacgtcatccgccgtggcgaccagactgaaacgggcgttatcccccatctggcggcttaatacctgccagtggtggaattgctgggtatgagcacggctggccgcggtatctaaacgcgcgggcaggtcatcctgtaagtctccggcaaacagaatacggctttgttcgaaatcatcactgtgacgcagcaagacttcacttgccggggtaaatgcagacatggaatgctcctcaattgatactggcggcgattatagccatatgttggcgcggtatcgacgaatttgctatatttgcgcccctgacaacaggagcgattcgctatgacatcccgacgagactggcagttacagcaactgggcattacccagtggagcctgcgtcgccctggcgcgttgcagggggagattgccattgcgatcccggcacacgtccgtctggtgatggtggcaaacgatcttcccgccctgactgatcctttagtgagcgatgttctgcgcgcattaaccgtcagccccgaccaggtgctgcaactgacgccagaaaaaatcgcgatgctgccgcaaggcagtcactgcaacagttggcggttgggtactgacgaaccgctaagtctggaaggcgctcaggtggcaagtccggcgctcaccgatttacgggcaaacccaacggcacgcgccgcgttatggcaacaaatttgcacatatgaacacgatttcttccctcgaaacgactgatttaccggcggcttaccacattgaacaacgcgcccacgcctttccgtggagtgaaaaaacgtttgccagcaaccagggcgagcgttatctcaactttcagttaacgcaaaacggcaaaatggcggcgtttgcgattacgcaagtggtgctggatgaagctacattgttcaatattgcggtcgatcctgactatcagcgtcagggattgggaagggcgctgctggaacatctgatcgacgaactggaaaaacgcggcgtggcgacactatggctggaagtccgtgctagtaacgctgccgccattgccctgtacgaaagtttaggctttaacgaggcgacgattcgccgcaattactaccccaccacggacggtcgcgaagacgccatcatcatggcgttgccaatcagtatgtaatacaaggtggaataatgaagtgggactggattttctttgatgccgatgaaacgctgtttacctttgacagtttcaccggcctgcagcggatgtttcttgattacagcgtcacctttaccgctgaagattttcaggactatcaggccgttaacaagccactgtgggtggattatcaaaacggcgcgatcactagtttacagcttcagcacgggcggtttgagagctgggccgaacggctgaacgtcgagccaggtaaactcaacgaagcctttattaatgcgatggcggaaatctgcacgccgctgccgggcgcggtttctctgcttaacgccattcgtggcaacgccaaaatcggcatcatcaccaacggctttagtgccttgcaacaggtgcgtctggaacgcacgggcctgcgtgattacttcgatttgctggtgatttccgaagaagttggcgttgccaaaccgaataagaaaattttcgattatgcgctggaacaggcgggcaatcctgaccgtagtcgcgtgctgatggttggcgacactgccgagtccgatattctcggtggcatcaacgccgggcttgcgacctgctggctgaatgcacaccatcgcgagcaaccagaaggcatcgcgcccacctggaccgtttctagcttgcacgaactggagcagctcctgtgtaaacactgattgcctcccccccgttgatgggtaaaatagccgcaatttttcgttttcaacaagcgcggcgcgatgccgcttactcaagaagaaagaattatgacgttgtctccttatttgcaagaggtggcgaagcgccgcacttttgccattatttctcacccggacgccggtaagactaccatcaccgagaaggtgctgctgttcggacaggccattcagaccgccggtacagtaaaaggccgtggttccaaccagcacgctaagagcgactggatggagatggaaaagcagcgtgggatctccattactacgtctgtgatgcagtttccgtatcacgattgcctggttaacctgctcgacaccccggggcacgaagacttcagcgaagatacctatcgtaccctgacggcggtggactgctgcctgatggttatcgacgccgcaaaaggtgttgaagatcgtacccgtaagctgatggaagttacccgtctgcgcgacacgccgatcctcacctttatgaacaaacttgaccgtgatatccgcgacccgatggagctgctcgatgaagttgagaacgagctgaaaatcggctgtgcgccgatcacctggccgattggctgcggcaagctgtttaaaggcgtttaccacctttataaagacgaaacctatctctatcagagcggtaaaggccacaccattcaggaagtccgcattgttaaagggctgaataacccggatctcgatgctgcggttggtgaagatctggcacagcagctgcgtgacgaactggaactggtgaaaggcgcgtctaacgagttcgacaaagagctgttccttgcgggcgaaatcactccggtattcttcggtactgcgctgggtaacttcggcgtcgatcatatgttggatggcctggtggagtgggcacctgcgccgatgccgcgtcagactgatacccgtaccgtagaagcgagcgaagataaatttaccggcttcgtatttaaaattcaggccaacatggacccgaaacaccgcgaccgcgtggcgtttatgcgtgtggtgtccggtaaatatgaaaaaggcatgaaactgcgccaggtgcgcactgcgaaagatgtggtgatctccgacgcgctgacctttatggcgggtgaccgtagccacgttgaagaagcgtatccgggcgatatcctcggcctgcacaaccacggcaccattcagatcggcgacacctttacccagggtgagatgatgaagttcaccggtattccgaacttcgcaccagaactgttccgtcgtatccgcctgaaagatccgctgaagcaaaaacagctgctcaaagggctggtacagctttccgaagagggcgcggtgcaggtgttccgtccaatctccaacaacgatctgatcgttggtgcagttggtgtgctgcagtttgatgtggtggtagcgcgcctgaagagcgaatacaacgttgaagcagtgtatgagagtgtcaacgttgccactgcccgctgggtagaatgtgcagacgcgaagaaattcgaagagttcaagcgtaagaacgaaagccaactggcgcttgatggcggcgataacctcgcttacatcgctaccagcatggtcaacctgcgcctggcacaggaacgttatccggacgttcagttccaccagacccgcgagcattaattcttgcctccagggcgcggtagccgctgcgccctgtcaatttcccttccttattagccgcttacggaatgttcttaaaacattcacttttgcttatgttttcgctgatatcccgagcggtttcaaaattgtgatctatatttaacaaagtgatgacatttctgacggcgttaaataccgttcaatgcgtagatatcagtatctaaagccgtcgattgtcattctaccgatattaataactgattcagaggctgtaatggtcgttattcatcactcatcgcttttgtgatggcgaccattgacttctgtagagggtgaagtctctccctattcagcaatgcaacctcgtgttgccaggctcaaattacgagcaaacatacaggaataaatcgatgactatgacaagactgaagattagcaaaactctgctggctgtaatgttgacctctgccgtcgcgaccggctctgcctacgcggaaaacaacgcgcagactaccaatgaaagcgcagggcaaaaagtcgatagctctatgaataaagtcggtaatttcatggatgacagcgccatcaccgcgaaagtgaaggcggccctggtggatcatgacaacatcaagagcaccgatatctctgtaaaaaccgatcaaaaagtcgtgaccctgagcggtttcgttgaaagccaggcccaggccgaagaggcagtgaaagtggcgaaaggcgttgaaggggtgacctctgtcagcgacaaactgcacgttcgcgacgctaaagaaggcagcgtgaagggctacgcgggtgacaccgccaccaccagtgaaatcaaagccaaactgctggcggacgatatcgtcccttcccgtcatgtgaaagttgaaaccaccgacggcgtggttcagctctccggtaccgtcgattctcaggcacaaagtgaccgtgctgaaagtatcgccaaagcggtagatggtgtgaaaagcgttaaaaatgatctgaaaactaagtaattcgtcgtaattcgtcctcccgaactttgtcgggaggcgcgatgtgcaccacactaaaaatatcgcattgagtgattttcacgctcatatcaagcggtgacattaactatggtaaaggagacgcttatgtttcgttggggcatcatatttctggttatcgcgttaatcgccgccgcacttgggtttggtggtctggccggtaccgctgcaggcgcagctaaaattgtctttgtcgtcgggattattctgttcctggtgagtttgttcatgggccgaaaacgaccctaaatttcagaccattaagaaaattttatccaaagccagtccagcggactggcttttgcggttttagcgaataataaattgcgttactttgtcattctttcacaacaaaaacaggaaggcagaggtggggcagcgaatacctgtaacgcttggtaatattgcgccgttgagcctaaggccgttccagcctggacgaatagctctggtgtgcgaaggcggcggacagcgtggaattttcacggctggcgtgctggatgagtttatgcgcgcgcagtttaatcctttcgatctttatctcggcacatctgccggggcgcagaacctcagcgcgtttatctgcaatcagcccggttacgcgcgcaaagtcatcatgcgctataccacaaaacgcgaatttttcgatccattgcgctttgtccgtggaggaaatcttatcgatctcgactggctggtggaggccactgcaagccagatgccgttgcaaatggataccgccgcgcggttgtttgacagcggcaaaagcttttatatgtgcgcctgtcgtcaggatgactacgcgccgaattactttttaccaaccaaacaaaactggctggatgtgattcgcgcctccagtgcgatacctggcttttatcgtagcggagtgagcctggaaggcattaactacctggatggcgggatcagtgatgcgattccggttaaagaggcggcaaggcagggcgctaaaacgttggtcgtcattcgcactgtgccgagtcaaatgtactacacgccgcagtggttcaaacgcatggaacgctggctgggtgacagtagcctgcagccgctggtcaatctggtgcagcatcatgaaaccagctatcgtgacattcagcaatttattgagaaaccaccgggcaagctgcggatattcgaaatttatccgccgaagccattacatagtatcgcgcttggcagtcggattccggcgctgcgtgaagactataaacttgggcgtttatgcggtcgttatttcctcgccacggttggcaagctattaactgaaaaagcgccgcttacccgccatctggtgccagtggtgacgccggaaagcattgtcattccgcctgcgccagtcgccaacgatacgctggttgccgaagtgagcgacgctccgcaggcgaacgacccgacatttaacaatgaggatctggcttgatttgccgttttatcgacacccactgccattttgatttcccgccgtttagtggcgatgaagaggccagcctgcaacgcgcggcacaagcgggcgtaggcaagatcattgttccggcaacagaggcggaaaattttgcccgtgtgttggcattagcggaaaattatcaaccgctgtatgccgcattgggcttgcatcctggtatgttggaaaaacatagcgatgtgtctcttgagcagctacagcaggcgctggaaaggcgtccggcgaaggtggtggcggtgggggagatcggtctggatctctttggcgacgatccgcaatttgagaggcagcagtggttactcgacgaacaactgaaactggcgaaacgctacgatctgccggtgatcctgcatagtcggcgcacgcacgacaaactggcgatgcatcttaaacgccacgatttaccgcgcactggcgtggttcacggtttttccggcagcctgcaacaggccgaacggtttgtacagctgggctacaaaattggcgtaggcggtactatcacctatccacgcgccagtaaaacccgcgatgtcatcgcaaaattaccgctggcaagcttattgctggaaaccgacgcgccggatatgccgctcaacggttttcaggggcagcctaaccgcccggagcaggctgcccgtgtgttcgccgtgctttgcgagttgcgccgggaaccggcggatgagattgcgcaagcgttgcttaataacacgtatacgttgtttaacgtgccgtaagccggataaggcgttcacgccgcatccggcagttggcgcacaatgcctgatgcgacgcttaacgcgtcttatcatgcctacaggtttgtgccgaaccgtaggccggataaggcgttcacgccgcatccggcagttggcgcacaatgcctgatgcgacgcttgtcgcgtcttatcatgcctacaagtctgtgccgaaccgtaggccggataaggcgttcacgccgcatccggcagtcggcgcataatgcctgatgcgacgcttgtcgcgtcttatcatgcctacaggtttgtgccgaaccgtaggccggataaggcgttcgcgccgcatccggcagttggcgcacaatgcctgatgcgacgcttgacgcgtcttatcaggcctacaagtctgtgccgaaccgtaggccgtatccggcatgtcacaaatagagcgccggaaatatcaaccggctcaccccgcgcacctttaacgcatcagccaacggctcaacgtcttccggcgtggcgctcgcccagctttgcgcctcgccatacacgccgtgggcatgaaacgcgttcaggcgtaccggaacatcgccgagtcccttgataaacgccgccagttcttcgatgtgttgcaaataatccacctggccagggatcaccagcaaacgcagttccgccagcttgccgcgctctgccagcaaatagatgctgcgcttaatctgctgattatcgcgtccggtgagttgttgatgacattcgctcccccacgctttgagatcgagcattgcgccgtcgcacaccgggagcaatttttcccagccggtttcgctcaacatgccgttactgtccaccagacaggtgagatggcgcagttgcggatcgtttttgatagcagtaaacagcgccaccacaaacggcagctgggtcgtggcttcaccgccactcaccgttatcccttcgataaacagcactgctttgcggacatggctaagcacttcgtccacgctcatggattgcgccatgggcgtggcatgttgcggacacctcttcaggcaggtatcacactgctcgcaaaccacagcgttccacaccactttgccgtcaacaatctgcaacgcctgatgcggacactgtggcacgcactccccacagtcattgcaacgtcccatcgtccacggattgtgacagtttttgcagcgcagattgcagccctgcaaaaacagagccagacgactgcctggcccgtcaacgcaggagaaggggataatcttactgactaaagcgcatctgctgttcatggcttatcacgcgcggctggcgttccagaatacgagtgttgcgtgcggcttcttcgcccagccaggtggtgttggtgcgactaccttcggcgcgatatttttctaaatcgctcaaacgcaccatataaccggtaacgcgaaccagatcgttaccgctgacattggcggtaaattcacgcattccggctttaaaggcaccgaggcaaagctgtaccagtgcctgcgggttacgtttgatggtttcgtcgagcgtcagaatgtcgctgatgccggaataataataagcatgatgcggggcgacagtttgcagatgggtgatcggatctggctcatcgccatacggcaaacgcgcgcccggcgtggtgccgatatcggaactgatcccgctctgtgcgtgtaacatggcgcgtttttgccagccatatttcacgggggtattggcgacaaactccgccagttgcgcgctgatgcgataacctacttcatttgcggcggcttctttaccgtagcgcgcggcaatcccttctttttcacacagcaagttaaccgcttccgccagcccatacatgccaaacattggcacaaaacgttcagggttaatcagcccttctttcaccaggaagctattctcaaagaagtgactttgttgatagaggaattcacaccgcgcatcgatgatggcgatctgctgctggcagtagtgcggtagagtgcgcgtaaagaagtcatccaggctttcgctgcgctcggcaatggctttcaggttaaggcgtaccagcgtgctgccaccacccgccagcggcagactgttgtaacagctcacaatcccgtagcccccttttgtgaaaattttatcatgcaccggaccgttggcgatgtgcggtttgctacattcacagatgttcttcgccacttccagcagcaggtcatcaggggtgatttcaggatcgtagataaaggtcaggttcggactaacctgcttcaactctgcatctgcacgtaagatcgcgcgggtaatggggctatcagacgggccgatattggcgtgcataaaggcgtctggcagggttctgtcgaggtaacgccagaaacgttttattcgaacatcgatctcgtcttgtgttagaattctaacatacggttgcaacaacgcatccagttgccccaggtagaccggcatgcttgtgacgctcggtacgtggtggtaaagaatggtcagcagagagagtgcgtcatcaagatctttcgcgccttccagctccagccattcggaaccgttcgccagaaaacgggcgtaatcgggtaagacatagcgcggtttgtacggcgcatgaccttcaaacatatcgcagattacaccttcatccagcgcgcggcgggcttcggcaggaagctgtgggtaaggcagattgttttctgcttccagtgccagaaaatggcgcttctgctccgggctaagcactgggctggtgacaatttgctggcaacgttgttgcagtgcattttcatgagaagtgggcatcttcttttccttttatgccgaaggtgatgcgccattgtaagaagtttcgtgatgttcactttgatcctgatgcgtttgccaccactgacgcattcatttgaaagtgaattatttgaaccagatcgcattacagtgatgcaaacttgtaagtagatttccttaattgtgatgtgtatcgaagtgtgttgcggagtagatgttagaatactaacaaactcgcaaggtgaattttattggcgacaagccaggagaatgaaatgactgatctgaaagcaagcagcctgcgtgcactgaaattgatggacctgaccaccctgaatgacgacgacaccgacgagaaagtgatcgccctgtgtcatcaggccaaaactccggtcggcaataccgccgctatctgtatctatcctcgctttatcccgattgctcgcaaaactctgaaagagcagggcaccccggaaatccgtatcgctacggtaaccaacttcccacacggtaacgacgacatcgacatcgcgctggcagaaacccgtgcggcaatcgcctacggtgctgatgaagttgacgttgtgttcccgtaccgcgcgctgatggcgggtaacgagcaggttggttttgacctggtgaaagcctgtaaagaggcttgcgcggcagcgaatgtactgctgaaagtgatcatcgaaaccggcgaactgaaagacgaagcgctgatccgtaaagcgtctgaaatctccatcaaagcgggtgcggacttcatcaaaacctctaccggtaaagtggctgtgaacgcgacgccggaaagcgcgcgcatcatgatggaagtgatccgtgatatgggcgtagaaaaaaccgttggtttcaaaccggcgggcggcgtgcgtactgcggaagatgcgcagaaatatctcgccattgcagatgaactgttcggtgctgactgggcagatgcgcgtcactaccgctttggcgcttccagcctgctggcaagcctgctgaaagcgctgggtcacggcgacggtaagagcgccagcagctactaagtaagatgctttacgcctgatgcgctgcgcttatcaggcctacgagacgtatctacccgtaggccggataaggcgtagacgcatccggcaaaagccgcctcatactcttttcctcgggaggttaccttgtttctcgcacaagaaattattcgtaaaaaacgtgatggtcatgcgctgagcgatgaagaaattcgtttctttatcaacggtattcgcgacaacactatctccgaagggcagattgccgccctcgcgatgaccattttcttccacgatatgacaatgcctgagcgtgtcagcctgaccatggcgatgcgagatagtggaaccgttctcgactggaaaagcctgcatctgaatggcccgattgttgataaacactccaccggtggcgtcggcgatgtgactagcctgatgttggggccgatggtcgcagcctgcggcggctatattccgatgatctctggtcgcggcctcggtcatactggcggtacgctcgacaaactggaatccatccctggcttcgacattttcccggatgacaaccgtttccgcgaaattattaaagacgtcggcgtggcgattatcggtcagaccagtagtctggctccggctgataaacgtttctacgcgacccgtgatattaccgcaaccgtggactccatcccgctgatcaccgcctctattctggcgaagaaacttgcggaaggtctggacgcgctggtgatggacgtgaaagtgggtagcggcgcgtttatgccgacctacgaactctctgaagcccttgccgaagcgattgttggcgtggctaacggcgctggcgtgcgcaccaccgcgctgctcaccgacatgaatcaggtactggcctccagtgcaggtaacgcggttgaagttcgtgaagcggtgcagttcctgacgggtgaatatcgtaacccgcgtctgtttgatgtcacgatggcgctgtgcgtggagatgctgatctccggcaaactggcgaaagatgacgccgaagcgcgcgcgaaattgcaggcggtgctggacaacggtaaagcggcagaagtctttggtcgtatggtagcggcacaaaaaggcccgaccgacttcgttgagaactacgcgaagtatctgccgacagcgatgctgacgaaagcagtctatgctgataccgaaggttttgtcagtgaaatggatacccgcgcgctggggatggcagtggttgcaatgggcggcggacgccgtcaggcatctgacaccatcgattacagcgtcggctttactgatatggcgcgtctgggcgaccaggtagacggtcagcgtccgctggcggttatccacgcgaaagacgaaaacaactggcaggaagcggcgaaagcggtgaaagcggcaattaaacttgccgataaagcaccggaaagcacaccaactgtctatcgccgtatcagcgaataacggtatactgatctgatcatttaaatttgaagcactgagtacggagaacatatgaaacgtgcatttattatggtgctggacagtttcggcatcggcgctacagaagatgcagaacgctttggtgacgtcggggctgacaccctgggtcatatcgcagaagcttgtgccaaaggcgaagctgataacggtcgtaaaggcccgctcaatctgccaaatctgacccgtctggggctggcgaaagcacacgaaggttctaccggtttcattccggcgggaatggacggcaacgctgaagttatcggcgcgtacgcatgggcgcacgaaatgagttccggtaaagataccccgtctggtcactgggaaattgccggtgtcccggttctgtttgagtggggatatttctccgatcacgaaaacagcttcccgcaagagctgctggataaactggtcgaacgcgctaatctgccgggttacctcggtaactgccactcttccggtacggtcattctggatcaactgggcgaagagcacatgaaaaccggcaagccgattttctatacctccgctgactccgtgttccagattgcctgccatgaagaaactttcggtctggataaactctacgaactgtgcgaaatcgcccgtgaagagctgaccaacggcggctacaatatcggtcgtgttatcgctcgtccgtttatcggcgacaaagccggtaacttccagcgtaccggtaaccgtcacgacctggctgttgagccgccagcaccgaccgtgctgcagaaactggttgatgaaaaacacggccaggtggtttctgtcggtaaaattgcggacatctacgccaactgcggtatcaccaaaaaagtgaaagcgactggcctggacgcgctgtttgacgccaccatcaaagagatgaaagaagcgggtgataacaccatcgtcttcaccaacttcgttgacttcgactcttcctggggccaccgtcgcgacgtcgccggttatgccgcgggtctggaactgttcgaccgccgtctgccggagctgatgtctctgctgcgcgatgacgacatcctgatcctcaccgctgaccacggttgcgatccgacctggaccggtactgaccacacgcgtgaacacattccggtactggtatatggcccgaaagtaaaaccgggcagtctgggtcatcgtgaaaccttcgcggatatcggccagactctggcaaaatattttggtacttctgatatggaatatggcaaagccatgttctgatggatttgggcggagcgttgactccgcctttgttatgtcacaaaaaggataaaacaatggctaccccacacattaatgcagaaatgggcgatttcgctgacgtagttttgatgccaggcgacccgctgcgtgcgaagtatattgctgaaactttccttgaagatgcccgtgaagtgaacaacgttcgcggtatgctgggcttcaccggtacttacaaaggccgcaaaatttccgtaatgggtcacggtatgggtatcccgtcctgctccatctacaccaaagaactgatcaccgatttcggcgtgaagaaaattatccgcgtgggttcctgtggcgcagttctgccgcacgtaaaactgcgcgacgtcgttatcggtatgggtgcctgcaccgattccaaagttaaccgcatccgttttaaagaccatgactttgccgctatcgctgacttcgacatggtgcgtaacgcagtagatgcagctaaagcactgggtattgatgctcgcgtgggtaacctgttctccgctgacctgttctactctccggacggcgaaatgttcgacgtgatggaaaaatacggcattctcggcgtggaaatggaagcggctggtatctacggcgtcgctgcagaatttggcgcgaaagccctgaccatctgcaccgtatctgaccacatccgcactcacgagcagaccactgccgctgagcgtcagactaccttcaacgacatgatcaaaatcgcactggaatccgttctgctgggcgataaagagtaattgtgtttcgctgcaaggcgattgccttgtgaagccggagcgggagactgctccggctttttagtatctattcatttttctctccagcttgaatattttcgctatacttttcagtgaaatgtgttaataaatctattcaagtatctattcacgaatctattcattaatgagcgagctgactgatcttttactgcaagggccgcgttctgccccggaattgcgccagcgtctggcaatcagtcaggcgacgttcagtcgccttgttgccagagaagatcgggtgattcgctttggtaaagcacgggcaacgcgatatgcactgctgcgtccttatcgcggaattgagcgtattcccgtctggcgggtggacgataccggaaaggcgcataaattcgccgacatccggttgtgctggccgcagggaagttgtctggtaacaggcgcagatggcgacgaacagtggtttgatggtttgccctggtatttgaccgatctccgaccgcagggctttttagggcgcgcgtggggcaggaagttagccgcgcaactgaatctgactgatgatatacgtctctggcaggaagaagatgtgctctacgccctgaccgtatttaacggtgaatatactggcggttggttggtcggggaggggaattatcagcgatggattactgcacaacaccctgcggaaattcctctggatcaaaaactcacccattacgaacagctggcaagtgatgcactggcaggagaaattgtgggttcttctgcgggcggcgagcagccaaaatttacctactatgcacaaacgccgagtggcaataaacatgtgttggtgaaattcaccgtaccacagcaaaccgcggtcagccaacgttggggtgacctgctaattgctgaatctattgccgcgcaaatcctgcgtgacggtgggatccacgccatcgagagtacggtgcttgtaacaagtaacaggcaggtattcctcgaagcggaacgctttgactgcaaaggtaacgatggtcgcttgcctattgtgagcctggaggcggtgcagagtgagtttatctcttctccgggaagctggccgcaggcaatgcgccgtttgtgtgagcaacaacttgtcactcaccagagcgtggcgcaaacagaagtgatctgggcatttgggcgacttatcgccaacagcgatatgcacgcaggtaatttaagcttttatttatctgaaccgccatttgcgctgacgcccgtctacgacatgctgccgatggtctatgcaccaaacagcgctggaatgctgcgtgatgctgccattgaggtgaagtttgatcttaacgtcagtaaaagcgcttggttaacggcgatcccgctggcgcagcagttctggcaaacggtcgccagagatccgcgtatcagcgaggcgtttcgccacattgcgcaagaaatgccggaaaaaatccggcaaatcgaagagaaagttgcccgcatgggcgggtaattaccttacagcccccgccatccatgcgcttaactcccgtagctctttttcctgttccgggaagtcaaccaacagcgcttcgcactcctgttgcagcatatctgcgcggtacaggcagccttgcagtcgtccggcgagggcttccagcggcgcggggttgaggctgtcggtaaacacctgggcgcgggtgatatggcctttttcaacgtcgaaatgcagttccacgccgccccaggtaaagcgttcatccagcagatggctgaatgccggagcctgaccgaagttccattcccagctactctggcgggcaaaggtttcggcgaagtttggcaagtctggcgttttgttcggggagatgatttccgcttccacgcgctcgccataatgggcgaaaaaggcctcggttatggcctcgcaaacctgctcatgggtgatccccggcaacagctcggtgaggttggtcacgcgggaacgtacgctcgtaatgcctttcgccgccagtttctttttatccggattgagatagtttgccaggcggctgaggtcggcattgagtagcaaggtgccgtggtggaagccgcgatctttggtttcgcgataggcgctgccactgactttgcggtcgccttcgacggttttcaccaccagatcgttacgtccggacgcttcggcgctgacgccgagcgcgttcagcgcattgagcacaatgctcgtggagatagttttatcgtactccggcttgccagccataaaggtaaagcaggtattgccgagatcgtggaacaccgcgccgccaccgctactgcgccgcgccaggcggacgttatcttcttccatccgccgggtattacactctttccacgggttctgcgcgcgaccaattactaccgtgtcggcattgcgccagagaaacagaacgcgctgcgtggcgggcatttggcgaaaaatacactcttccaccgccaggttaaaccacgggtcgtaagagtcagagatgagcaggcgtaatgtggacataacgatttcctttcttgtagtaatgggtcactcttttttctcgctttcttcctcttccggcaccggtttgctggcggttaacaggaaggggctttgctgccagcgggtgcgtttaccctgtagcagcgtgcgggtcagcactacaccgattgccagactgagcagcaacatcaggcgtaaaatgttagtggtgttatccacctgttgggcttcggtggcgagcgtatgggtgtcgagtgtcaggcgcagatagccgagcggtccgtttttacccgcaattggctcgacaatctgctggttaaaatagccgcctgcttttttaccgtcgagcgccagccggtcgcgcacttcgacgctttcgccagaacgtgcgataagatcgccttgttcgtcatacacacccgcgtcgaggatacggctttcatccgttaactgatcgaggatcgcctgaatgcgtttttcatccggactgtcggtacgcatcagcggtgcaacgttcagcgtcacctgacgcgccagggtgcgggccagttcttccagctgtggattacgctgtcgctggtggttttgactaaaccaactcgctccctgcatcagcgccactaacaaggcaagacagaacaggacaatcactgcccgatgcagccggaatttcagttttgtgcgagccatcttccaccctttgaaaatttgagacttaatgttgccagaagcaatggatacaaggtagcctcatgcgttattttccctgcttcgaacgattttacaggagccttaatgcctaacattacctggtgcgacctgcctgaagatgtctctttatggccgggtctgcctcttagtttaagtggtgatgaagtgatgccactggattaccacgcaggtcgtagcggctggctgctgtatggtcgtgggctggataaacaacgtctgacccaataccagagcaaactgggtgcggcgatggtgattgttgccgcctggtgcgtggaagattatcaggtgattcgtctggcaggtagtctcaccgcacgggctacacgcctggcccacgaagcgcagctggatgtcgccccgctggggaaaatcccgcacctgcgcacgccgggtttgctggtgatggatatggactccaccgccatccagattgaatgtattgatgaaattgccaaactggccggaacgggcgagatggtggcggaagtaaccgaacgggcgatgcgcggcgaactcgattttaccgccagcctgcgcagccgtgtggcgacgctgaaaggcgctgacgccaatattctgcaacaggtgcgtgaaaatctgccgctgatgccaggcttaacgcaactggtgctcaagctggaaacgctgggctggaaagtggcgattgcctccggcggctttactttctttgctgaatacctgcgcgacaagctgcgcctgaccgccgtggtagccaatgaactggagatcatggacggtaaatttaccggcaatgtgatcggcgacatcgtagacgcgcagtacaaagcgaaaactctgactcgcctcgcgcaggagtatgaaatcccgctggcgcagaccgtggcgattggcgatggagccaatgacctgccgatgatcaaagcggcagggctggggattgcctaccatgccaagccaaaagtgaatgaaaaggcggaagtcaccatccgtcacgctgacctgatgggggtattctgcatcctcagtggcagcctgaatcagaagtaattgctcgcccgccatcctgcgggcggcacagcattaacgaggtacaccgtggcaaaagctccaaaacgcgcctttgtttgtaatgaatgcggggccgattatccgcgctggcaggggcagtgcagtgcctgtcatgcctggaacaccatcaccgaggtgcgtcttgctgcgagcccaatggtggcgcgtaacgagcgtctcagcggctatgccggtagcgccggggtggcaaaagtccagaaactctccgatatcagccttgaagagctgccgcgtttttccaccggatttaaagagttcgaccgcgtactaggcggcggcgtggtgccaggaagtgccattctgattggcggtaaccctggtgcggggaaatccacgctgctactgcaaacgctgtgcaaactggcccagcagatgaaaacgctgtatgtcaccggcgaagagagcctgcaacaggtggcaatgcgcgctcatcgccttggcctgccgactgacaatctcaatatgttgagcgaaaccagcatcgaacagatctgcctgattgccgaagaagagcaaccgaagctgatggtaattgacagcatccaggtgatgcatatggcggatgtacagagtagccctggtagcgtggcgcaggtgcgtgaaacggcggcttatttgacacgcttcgccaaaacgcgcggtgtggcgattgtcatggtggggcacgtaaccaaagatggtagcctggctggcccgaaagtgctggaacactgtatcgactgtagcgtgcttttggatggcgatgccgactcccgttttcgcaccttgcgcagccataaaaaccgcttcggcgcggtgaatgagctgggcgtcttcgcgatgaccgaacaggggctgcgtgaagtcagcaaccctagcgcaattttcttaagtcgcggcgatgaagtgacctccggtagcagtgtgatggtggtatgggaaggaacgcgtccactgctggtggagattcaggcgctggtcgatcacagcatgatggcgaacccacgccgcgtggcagtggggctggaacaaaaccgtctggcaatcctgctggctgtgttgcaccgtcacggtggtctgcaaatggccgatcaggatgtgtttgtgaacgtggtcggcggcgtgaaggtaaccgaaaccagtgccgacttagcgttactgctggcgatggtttccagcctgcgcgacagaccgctgccgcaggatctggtggtgtttggtgaagtcgggctggcaggggagatccgcccggtgcccagcggtcaggaacgaatctctgaagcggcgaaacacggttttcgccgggcgattgttccggcggctaacgtgccgaaaaaagcgccggaagggatgcagatttttggcgttaaaaaactctccgacgcgcttagcgtgttcgacgacttataatgagatatacggagggagatatgagcagttttgattacctgaaaactgccatcaagcaacagggctgcacgctacagcaggtagctgatgccagcggtatgaccaaagggtatttaagccagttactgaatgccaaaatcaaaagccccagcgcgcaaaagctggaggcgttgcaccgttttttggggcttgagtttccccggcagaagaaaacgatcggtgtcgtattcggtaagttctacccactgcataccggacatatctaccttatccagcgcgcctgtagccaggttgacgagctgcatatcattatgggttttgacgatacccgtgaccgcgcgttgttcgaagacagtgccatgagccagcagccgaccgtgccggatcgtctgcgttggttattgcaaacttttaaatatcagaaaaatattcgcattcatgctttcaacgaagagggcatggagccgtatccgcacggctgggatgtgtggagcaacggcatcaaaaagtttatggctgaaaaagggatccagccggatctgatctacaccagcgaagaagccgatgcgccacagtatatggaacatctggggatcgagacggtgctggtcgatccgaaacgtacctttatgagtatcagcggtgcgcagatccgcgaaaacccgttccgctactgggaatatattcctaccgaagtgaagccgttttttgtgcgtaccgtggcgatccttggcggcgagagcagcggtaaatccaccctggtaaacaaacttgccaatatcttcaacaccaccagtgcgtgggaatatggccgcgattatgtctttagtcacctcggcggtgatgagatcgcattgcagtattctgactacgataaaatcgcgctgggccacgctcaatacattgattttgcggtgaaatatgccaataaagtggcatttatcgataccgattttgtcaccactcaggcgttctgcaaaaagtacgaagggcgggaacatccgttcgtgcaggcgctgattgatgaataccgtttcgatctggtgatcctgctggagaacaacacgccgtgggtggcggatggtttacgcagcctcggcagtagcgtggatcgcaaagagttccagaacttgctggtggagatgctcgaagagaacaatatcgaatttgtgcgggttgaagaggaagattacgacagtcgtttcctgcgctgcgtggaactggtgcgggagatgatgggggagcagagataaccgtgatgaaactgctcaaaggcgaggtataaaatgagtttttttgatgagttgaaaacctctctggaagaggctgtcgagattaaacaaggtttgaaaaaacctgcacgggtgacccgccacgaaattgaggatgctaaggctgttgtagaccggaaacggtgttcacgccgcatccggcattcggtgctcaatgcctgatgcgacgcttaccgcgtcttatcaggcctacagttttacaacgtattgaaattgctggttttgtaggccggataaggcgttcgcgccgcatccggcattttacgcattacttcgcaatacgcttgtacttgatacgcttcggctccagcgcgtctgcgcccagcgtgcgtttcttgtactcttcgtactcggtaaagttaccttcgaagaactcaactttaccttcatcctggtaatccagaatgtgcgtggcgatacggtcgaggaaccaacggtcgtggctgataaccatcgcacagcccgggaactccagcagggcgttttccagcgcgcgcagggtttcgatatccaggtcgttggttggttcgtcgagcagcagcatgttgccgccaacctgcagcagcttcgccagatgcagacgaccgcgctcaccaccggagagttcaccaacgcgtttaccctgatcaacccctttaaagttaaagcggccaacgtaggcgcggcttggcatctcggtgttgccgatcttcatgatatccagcccgccggaaacttcttcccaaacggttttgctgttatccatactgtcacggaactgatcaacgctcgccagtttcaccgtttcacccaaagtgatggtgccgctgtccggctgttcctgaccagagatcatacggaacagggtgcttttacccgcaccgttcggaccgatgatcccgacgatcgctcctttcgggatgctgaagctcaggtcatcaatcagcagacgatcgccataggatttacgcaggttgctgacttccagcactttatcgcccagacgcggtccaggtggaataaacagttcgttggtttcgttacgtttctgatattcggtgctgttcagttcttcaaagcgcgccagacgtgctttacctttgctctgacggcctttagtaccttgacgtacccattccagctctttctcaatgctcttacgacgcgccgcttcttgactagcttcctgcgccaggcgctgatctttctgctccagccaggaggagtagttaccttcccacggaataccttcaccgcggtcaagttcgaggatccagcctgcaacgttatcgaggaagtaacggtcgtgggtaatcgccacaacggtgccttcgaagtcgtgcaggaagcgttccagccaggccacggattcggcatccaggtggttggtcggttcgtcgagcagcagcatgtctggtttttccagcagcaggcggcacaacgctacgcgacgacgttcaccaccggagaggttagcgattttcgcgtcccagtccggcagacgtagcgcatccgccgcacgctccagctgtacgttcagattatgaccgtcgtgagcctgaatgatctcttccagacggccttgttcagcggccagcttgtcaaaatcggcatccggatcggcgtacagcgcatacacttcatccaggcgtttcagggcgttaaccacttcactaaccgcttcttcaatggactcacgcacggtgtgttccgggttcagctgcggttcctgcggcagataaccaatcttgatgtctggctgcggacgcgcttcaccttcgatgtctttatcaatgcccgccataatgcgcagcagggtggacttacccgcgccattcagacccaggacaccaatttttgccccagggaagaaactcagagagatgtttttcaaaatatgacgtttcggcggaacaactttgccgacacgatgcatggtataaacgaattgagccacgttggacttcgcctctatgtttatcgtgataatgagttttcaaaggcgaagtgtagcctttttccccgcctaatcccagccggtcgatcaccctcgcagtaaaagtaaaaaagtgtccgtaacgtggcgtaaacggcaatgactggttagcataaatctattacgcggcatgacgctgcattgatgtatttacacttagaggatgcgcttgtggaaaaagccaaacaagttacctggcggctgttggctgccggtgtctgtctgctgacggtcagcagcgtggcgcgagccgacagtctggatgagcagcgtagtcgttacgcgcaaatcaagcaggcctgggataatcgacaaatggatgtggtcgaacaaatgatgcctggactgaaggattatccgctttatccctacctggaataccgccagatcaccgatgatctgatgaatcaaccggcggtgacggtcactaactttgttcgcgctaaccccacgcttcctcccgctcgcacgctgcaatctcgtttcgtcaatgaactggcgcggcgtgaagactggcgtggcttgttagcctttagcccggaaaagcccggaactaccgaagcgcaatgtaattactactatgcgaaatggaacaccgggcagagtgaagaagcctggcaaggggcgaaagagctgtggctaaccggcaagagccagcctaacgcctgtgacaagttatttagcgtctggcgtgcgagtggtaaacaagatccgctggcgtatttagagcgtatccgtctggcgatgaaagcgggtaacacaggcctggtaacagtgctggcagggcagatgcctgccgattaccagactatcgccagcgcaatcattagtctggcgaacaaccctaatacggtactgaccttcgcgcgtacaactggcgcgaccgattttacccgtcaaatggcggcggtggcgtttgccagtgtggcgcggcaggatgctgagaatgcacggctgatgatcccaagccttgcccaggcgcagcagcttaatgaagatcagattcaggagctgcgcgatatcgtcgcctggcgtttgatgggcaacgatgtcaccgacgagcaggcgaaatggcgcgatgacgccattatgcgcagccaatctactagccttattgaacgccgtgtacgaatggcgcttggcaccggcgatcgtcgcggcctgaatacctggctggcgcgtctgcctatggaagcgaaagagaaagatgaatggcgttactggcaggcggatttattgctggaacgcggacgtgaagctgaagcaaaagagattttgcatcaactcatgcaacagcgtggtttctacccgatggttgcagcacaacgcatcggcgaagagtatgagctgaagattgataaagcgccgcagaatgttgacagcgccctgactcaggggccggagatggcgcgcgtgcgcgagttgatgtactggaatctcgataataccgcgcgtagcgagtgggccaatctggtgaagagcaagagtaaaacagagcaggctcaactggcgcggtatgctttcaacaaccaatggtgggatcttagcgttcaggcaacgatcgccgggaagctgtgggatcatctggaagagcgattcccgctggcttacaacgatcttttcaaacgctacaccagcggtaaggagatcccgcaaagctatgcgatggcgattgctcgtcaggagagcgcctggaatccgaaagtgaaaagtccggtaggggccagcggcttgatgcagattatgcctggtacagcgacccatacggtgaagatgttctctattcccggttatagcagtcctgggcaattgctggatccggaaacgaatatcaacattggcaccagttacctgcaatatgtttatcagcagtttggcaataatcgtattttctccagtgcagcttataacgccggaccagggcgggtgcgaacctggcttggcaacagcgccgggcgtatcgacgcagtggcatttgtcgagagtattccattctccgagacgcgcggttatgtgaagaacgtgctggcttatgacgcttactaccgctatttcatgggggataaaccgacgttgatgagcgccacggaatggggacgtcgttactgatccgcacgtttatgatatgctatcgtactctttagcgagtacaaccgggggaggcattttgcttcccccgctaacaatggcgacatattatggcccaacaaagtccctatagtgcagcgatggcagaacagcgtcaccaggagtggttacgttttgtcgacctgcttaagaatgcctaccaaaacgatctccatttaccgttgttaaacctgatgctgacgccagatgagcgcgaagcgttggggactcgcgtgcgtattgtcgaagagctgttgcgcggcgaaatgagccagcgtgagttaaaaaatgaactcggcgcaggcatcgcgacgattacgcgtggatctaacagcctgaaagccgcgcccgtcgagctgcgccagtggctggaagaggtgttgctgaaaagcgattgattttgtaggcctgataagacgtggcgcatcaggcatcgtgcaccgaatgccggatgcggcgtgaacgccttatccgtcctacaaatacccgtaatttcaatatgtttggtaggcatgataagacgcggcagcgtcgcatcaggcgcttaatacacggcattatgaaacggactcagcgccaggatcaccgcctggtgatagacgctggcgcgagtgagtttcccggcggtaaacacgccgatcgccccttccttacgaccaatctcatcaataccggtataacggctcatcacgggaccaagcgcctcaccttcacgcactttttccagaatcaccgcaggcaacggcaaagtagcgctacgcgcctcgccgcgctggctggcgttttcaatcaccacccaactgaaagtgctgtcaccatcgatgccagcttcaatcgccacccaaaaatcagcctctggaagtaaacggcgggcattggctacccgatttcgtgcgccagcgcgcgtttcctcactgccaaagggctgttccggtacaccgctctcgacggcaacggatgcaatatggcaggatccttcgccgaagatctcgtgaaatgcctgcagaatggcctgaattttagcgggattggtggtcgcacagacaacttggtgcataatcagcattactcagaaaattaacgttacagcagtatacggaaaaaaagcatgttacaggtatacctagtccgccacggtgaaacgcagtggaacgccgagcgacgtattcagggccagtctgacagcccgctgaccgccaaaggtgagcaacaggcgatgcaggtggcaacccgtgccaaagagcttggcattacgcatatcatcagtagcgatttaggacgcacccggcgtacggcggaaatcatcgcccaggcctgcggctgtgacatcatctttgattctcgcctgcgtgaattaaacatgggtgtgctggaaaaaagacatatcgattctctgaccgaagaagaagagaactggcgtcggcagctggtcaatggcaccgttgacgggcgtattcctgaaggcgagagtatgcaggagctcagcgatcgcgtcaatgcggcactggaatcttgccgggacttaccgcagggaagccgaccgctgctggtgagtcatggtattgcactgggatgcctggtgagtacgattctcggattaccagcatgggcagagcgccgcttacgtctgcgtaactgttctattagccgcgtggattatcaggaaagcctgtggctggcgtctggctgggtcgttgaaaccgcaggggacatcagccatctggacgcccctgcattagatgagctgcagcgttaacgacggatcggaatcagcagttcacagcgtagattaattgggcgatctcccgctttggcatcttctgccgggtagtatcgctcaatatcctgacctttacggcgcgtcaggttgagcattggcatgcacgttccgtataccgtcaggataaactcctgcacgccggttcccagaccttcataggtaaacatcacatattcgccgccctgcagcatcaccggatgccccgtcagtacatagccatctgcctgatcctgggctaacgcggtggtatagaatacctcttgctcgtcgtctttatcctgactcggacgcgtttcattcaggccgtagagcaccggcggaatggtcggcgcgttgccgagaaaatcgtgccagaactgataacgcatttcatggcggaaatcagagatttgctccaggctacaggagtagctctgggtaacaccaatcagcggcgtatcttccagggtgacaaatttgtgctctggcatagtgaattcacccaggcgtagcggcgggcgaataccaaaggcgctccattcaggagaacggcggtaaagtgcaggagtctgggcaaactgcttcttgaatgcgcgggtaaatgtctgttgagagtcgaagcggtattgcagcgcgatgtccagaatcggacgcgcagtcaggcgtagtgcgaccgcgcttttgctcaaacgacgagcacgaatatacgcgccaatagcatggccagtgacatctttaaacattctctgtaagtgccacttggaataacctgctttcgccgctacattgtcgaggctcaggggctgatccagatgaccttccagccagattaaaaggtcgcgaataatgccggcctgatccataaaatatcctcatcctttcaacaacgagcacctgacatcaggtaattggataatagcattttttgctgttttagcattcagtgtttttttcttagtagagtatgttttagggcttgacggaaataaaagtattgagattttgttcttaatcaatatgttatttaccgtgacgaactaattgctcgtgtaatagataaaaatggtaacaatatgaaatacaagcatttgatcctgtctttaagcctgataatgctggggccattggctcatgcagaagagattggtagcgtcgacaccgtatttaaaatgatcggcccggatcacaaaattgttgtggaagcctttgatgatcccgatgtgaaaaatgtcacctgttatgtgagccgggcgaaaaccggtggtattaaagggggattgggtctggcggaagatacctccgatgcggccatttcttgtcagcaagtcgggccgattgaactgagcgatcgtattaaaaacggcaaagctcagggcgaggtagtattcaaaaaacgcacgtccctggtctttaagagcttacaggtcgtgcgcttttatgatgccaaacgcaacgcgctcgcttatctggcttactccgacaaagttgtagaaggtagcccgaaaaacgcgattagcgcggttcctgtcatgccgtggcggcaataacagaggcgatttatgcaacgggaaacggtctggttagtggaagatgagcaagggatagccgacacgctggtctacatgttgcagcaggaaggttttgccgtcgaggtctttgagcgaggcttgccggtgctggataaagctcgcaagcaggtacccgacgtcatgattctcgatgttggtctgccggatattagcggctttgaattgtgccgccagttactggcgctccatccggcgttacctgtactgttcctgacggcccgaagtgaagaggtcgatcgcctgcttgggctggaaattggtgctgacgactacgtggctaaaccgtttagtccccgcgaagtgtgcgccagggtgcgcaccttactgcgtcgggtgaagaagttcagcacgccgtctcccgtcatccgtattggacattttgaattgaatgaacccgcggcgcagatcagctggtttgacacgccattagcgctgactcggtatgagtttttattgttgaagacgttactcaagagtccgggccgcgtctggtcccgccagcaactgatggatagcgtatgggaagatgcgcaggacacctacgatcgcaccgtcgatacccacattaaaacgctgcgtgccaagctgcgcgccatcaaccccgatcttagtccgattaatactcatcgcggcatgggatatagcctgaggggcctgtaatgcgtatcggcatgcggttgttgctgggctattttttactggtggcggtggcagcctggttcgtactggccatttttgtcaaagaagttaaaccgggcgtgcgaagagcaacggaggggacgttgatcgacaccgcaacgttgctggcggagctggcgcgtcccgatttgctctctggggacccaacgcatgggcaactggcgcaggcgtttaatcagctacaacatcgcccgtttcgcgccaatatcggtggcattaacaaagtgcgcaatgaatatcatgtctatatgaccgatgcgcagggcaaagtattgttcgatagcgcaaataaagccgttggacaggattatagccgctggaatgacgtctggctaacgttgcgtggtcagtatggtgcgcgcagcacgttgcaaaatcctgccgatcccgaaagttctgtgatgtatgttgccgcaccgattatggacggcagccggcttattggcgttttgagcgtaggcaaaccgaacgcggcgatggctccggtcattaagcgtagcgagcggcgaattttatgggccagcgccattttgttggggattgcactggtgattggcgcaggcatggtttggtggatcaaccgctctattgcccggctcactcgctatgctgattccgtcactgacaataagcccgttcctctccccgatctcggtagtagcgagttgcgtaaactcgcgcaggcgctggaaagtatgcgcgtgaagctggaagggaaaaactatattgagcagtatgtttacgcattaactcatgagctaaaaagcccactggcggcgattcgtggagcggcggaaattttacgcgaaggtccgccgccggaagtggtggctcgttttactgacaacattctgacgcaaaatgcgcgtatgcaggcattggtagaaacgttactacgccaggcaagactggagaatcgtcaggaagtcgttctgactgctgttgatgtggcggcattattccgccgcgtcagcgaagcgcgcaccgtgcagttggcagaaaaaaaaatcactctgcatgttacgcccaccgaggttaacgttgctgctgaaccggcgttactggagcaggcgctgggaaatttactggataacgccatcgattttacccccgagagcggttgcatcacgctaagcgccgaagtggatcaggaacacgtcacgcttaaggtgctggataccggtagtggtattcctgactacgcgcttagtcgtatttttgaacgcttttactctttgcctcgtgcaaatgggcaaaaaagcagcggtctggggttggcgttcgtcagtgaggtcgcccgtttgtttaacggcgaagtcacgctgcgcaacgtgcaggaaggtggcgtgctggccagccttcgacttcaccgtcacttcacataacttcaaattcttcccacatagtcttcgtatcctgctgccattgcaaaggagaagactatgttgaaatcccccctgttctggaaaatgactagcctgtttggtgcagtattgctgttgttgattccgataatgctgattcggcaggtgattgtcgaacgtgctgattaccgtagcgatgtggaagatgcgattcgccaaagtaccagcgggccgcaaaaactcgttgggccgctcatcgctattcctgtgaccgagctttatacggtgcaggaagaggataaaaccgtggagcggaaacgaagttttatccatttttggttacctgagagtttgatggttgatggcaatcagaacgtggaagaacgcaagatagggatttataccggtcaggtctggcacagtgatttaacgttaaaagccgatttcgatgttagccgtcttagcgaactcaacgcgccaaatatcaccttaggcaagccatttattgtgattagcgtcggggatgcgcgtggtattggtgtggtgaaagcgcctgaagttaacggaacggcgctgaccattgaacccggcaccgggttagagcaaggcgggcagggcgtgcatatccctttacctgaaggggactggcggaagcagaacctgaagctgaatatggccctgaatttaagcggtaccggcgatctttctgtggtgcctggcgggcgtaatagcgaaatgaccttaaccagcaactggccgcatcccagttttttaggtgattttctaccagccaaacgggaagttagcgagagtggttttcaggcgcactggcaaagcagctggtttgctaataatctcggtgagcgttttgctagtggcaatgataccggctgggaaaacttcccggcgtttagcgtcgcagtaacgacgccagccgatcaataccaattaactgaccgggcgactaagtacgccattctgctgattgcactgacttttatggcgttctttgtttttgaaacgctcaccgcgcaacgtttacacccaatgcaatatttgctggtggggcttagtttggtgatgttttatttgctcttgctggcgctttctgaacataccggttttaccgtggcatggataatcgccagtctgattggggcgataatgaacggtatttatttgcaagcggtattgaaaggttggtgcaacagcatgttgtttaccctcgcgctgttgttgctggatggtgtgatgtggggactgctcaactctgccgatagcgcgctgttgttgggaaccagtgtgctggtggtggcgctggccggcatgatgtttgtgacccgtaatatcgactggtatgcgtttagtctgccgaaaatgaaagccagtaaagaagttacaacggacgatgagttacgtatctggaaataaggttgaaaaataaaaacggcgctaaaaagcgccgttttttttgacggtggtaaagccgattaatcttccagatcaccgcagaagcgataaccttcaccgtgaatggtggcgatgatttccggcgtatccggcgtagattcgaaatgtttacgaatacggcggatcgtcacgtctacagtacggtcgtgcggtttcagctcacggccggtcattttcttcagcagttcagcacgggactgaattttgcctgggttttcacagaagtgaagcatggcgcggaactcgctgcgcggcagcttgtactgctcgccatcagggccgatcaagctacggctgttgatgtccagttcccaaccattgaacttgtagctttcaacgctacgacgttcttcgctgacagtacccagattcatggtacgggacagtaggttgcgtgcacgaatcgtcagttcacgcgggttgaacggtttggtgatgtagtcatctgcaccgatttcgaggccgagaattttatcgacttcgttgtcacggccagtcaggaacatcaacgcaacattcgcctgctcgcgcagttcacgcgctaacagaagaccgttcttacccggcagattgatatccatgatcaccaggttgatgtcatattcagagaggatctgatgcatttccgcgccatctgtcgcttcgaaaacatcatagccttccgcttcgaaaatacttttcaacgtgttgcgtgttaccaactcgtcttcaacgataagaatgtgcggggtctgcatgtttgctacctaaattgccaactaaatcgaaacaggaagtacaaaagtccctgacctgcctgatgcatgctgcaaattaacatgatcggcgtaacatgactaaagtacgtaattgcgttcttgatgcactttccatcaacgtcaacaacatcattagcttggtcgtgggtactttccctcaggacccgacagtgagtaaaacggctgtcatcctaaccattttaacagcaacataacaggctaagaggggccggacacccaataaaactacgcttcgttgacatatatcaagttcaattgtagcacgttaacagtttgatgaaatcatcgtatctaaatgctagctttcgtcacattattttaataatccaactagttgcatcatacaactaataaacgtggtgaatccaattgtcgagatttattttttataaaattatcctaagtaaacagaaggatatgtagcattttttaacaactcaaccgttagtacagtcaggaaatagtttagccttttttaagctaagtaaagggctttttctgcgacttacgttaagaatttgtaaattcgcaccgcgtaataagttgacagtgatcacccggttcgcggttatttgatcaagaagagtggcaatatgcgtataacgattattctggtcgcacccgccagagcagaaaatattggggcagcggcgcgggcaatgaaaacgatggggtttagcgatctgcggattgtcgatagtcaggcacacctggagccagccacccgctgggtcgcacatggatctggtgatattattgataatattaaagttttcccgacattggctgaaagcttacacgatgtcgatttcactgtcgccaccactgcgcgcagtcgggcgaaatatcattactacgccacgccagttgaactggtgccgctgttagaggaaaaatctagttggatgagccatgccgcgctggtgtttggtcgcgaagattccgggttgactaacgaagagttagcgttggctgacgttcttactggtgtgccgatggtggcggattatcctagcctcaatctggggcaggcggtgatggtctattgctatcaattagcaacattaatacaacaaccggcgaaaagtgatgcaacggcagaccaacatcaactgcaagctttacgcgaacgagccatgacattgctgacgactctggcagtggcagatgacataaaactggtcgactggttacaacaacgcctggggcttttagagcaacgagacacggcaatgttgcaccgtttgctgcatgatattgaaaaaaatatcaccaaataaaaaacgccttagtaagtatttttc
